(19) United States
(12) Patent Application Publication
(10) Pub. No.: US 2009/0053807 A1
(43) Pub. Date: Feb. 26, 2009

(54) Insulin and IGF-1 Receptor Agonists and Antagonists

(75) Inventors: Renuka Pillutla, Bridgewater, NJ (US); Olga Dedova, Highland Park, NJ (US); Arthur J. Blume, East Greenwich, RI (US); Neil I. Goldstein, Maplewood, NJ (US); Renee Brissette, Clarksburg, NJ (US); Pinger Wang, North Brunswick, NJ (US); Hao Liu, Pennington, NJ (US); Ku-chuan Hsiao, Easton, PA (US); Michael Lennick, Exton, PA (US); Paul Fletcher, Cheshire, CT (US)

Correspondence Address: MINTZ, LEVIN, COHN, FERRIS, GLOVSKY AND POPEO, P.C, 5 Palo Alto Square - 6th Floor, 3000 El Camino Real, PALO ALTO, CA, 94306-2155, US

(73) Assignees: Novo Nordisk A/S, Bagsvaerd (DK); Antyra Inc., Edison, NJ (US)

(21) Appl. No.: 11/949,153

(22) Filed: Dec. 3, 2007

Related U.S. Application Data
(63) Continuation of application No. 11/410,222, filed on Apr. 24, 2006, now abandoned.
Application No. 11/410,222 is a continuation of application No. 10/253,493, filed on Sep. 24, 2002, now Pat. No. 7,173,005.
Application No. 10/253,493 is a continuation-in-part of application No. 09/962,756, filed on Sep. 24, 2001, now Pat. No. 6,875,741.
Application No. 09/962,756 is a continuation-in-part of application No. 09/538,038, filed on Mar. 29, 2000, now abandoned.
Application No. 09/538,038 is a continuation-in-part of application No. 09/146,127, filed on Sep. 2, 1998, now abandoned.

(51) Int. Cl. C12N 5/06

(52) U.S. Cl. 435/375

(57) ABSTRACT

Peptide sequences capable of binding to insulin and/or insulin-like growth factor receptors with either agonist or antagonist activity and identified from various peptide libraries are disclosed. This invention also identifies at least two different binding sites, which are present on insulin and insulin-like growth factor receptors, and which selectively bind the peptides of this invention. As agonists, the peptides of this invention may be useful for development as therapeutics to supplement or replace endogenous peptide hormones. The antagonist peptides may also be developed as therapeutics.

### I. CROSS-REFERENCE TO RELATED APPLICATIONS

[0001] This application is a continuation of U.S. application Ser. No. 11/410,222 filed Apr. 24, 2006 which is a continuation of U.S. application Ser. No. 10/253,493 filed Sep. 24, 2002 which is a continuation-in-part of U.S. application Ser. No. 09/962,756 filed Sep. 24, 2001, which is a continuation-in-part of U.S. application Ser. No. 09/538,038 filed Mar. 29, 2000, which is a continuation-in-part of U.S. application Ser. No. 09/146,127, filed Sep. 2, 1998, all of which are incorporated herein by reference in their entirety.

### II. FIELD OF THE INVENTION

[0002] This invention relates to the field of hormone receptor activation or inhibition. More specifically, this invention relates to the identification of molecular structures, especially peptides, which are capable of acting at either the insulin or insulin-like growth factor receptors as agonists or antagonists. Also related to this invention is the field of molecular modeling whereby useful molecular models are derived from known structures.

### III. SEQUENCE LISTING

[0003] The parent application of U.S. application Ser. No. 11/410,222 filed Apr. 24, 2006, U.S. application Ser. No. 10/253,493 filed Sep. 24, 2002, contains a “lengthy” sequence listing which has been submitted via CD-R in lieu of a printed paper copy, and is hereby incorporated by reference in its entirety. Said CD-R, recorded on Apr. 21, 2006, are labeled “CRF,” “Copy 1” and “Copy 2”, respectively, and each contains only one identical 932 Kb file (65975US2.APP).

### IV. BACKGROUND OF THE INVENTION

[0004] Insulin is a potent metabolic and growth promoting hormone that acts on cells to stimulate glucose, protein, and lipid metabolism, as well as RNA and DNA synthesis. A well-known effect of insulin is the regulation of glucose levels in the body. This effect occurs predominantly in liver, fat, and muscle tissue. In the liver, insulin stimulates glucose incorporation into glycogen and inhibits the production of glucose. In muscle and fat tissue, insulin stimulates glucose uptake, storage, and metabolism. Defects in glucose utilization are very common in the population, giving rise to diabetes.

[0005] Insulin initiates signal transduction in target cells by binding to a specific cell-surface receptor, the insulin receptor (IR). The binding leads to conformational changes in the extracellular domain of IR, which are transmitted across the cell membrane and result in activation of the receptor's tyrosine kinase activity. This, in turn, leads to autophosphorylation of tyrosine kinase of IR, and the binding of soluble effector molecules that contain SH2 domains such as phophoinositol-3-kinase, Ras GTPase-activating protein, and phospholipase Cγ to IR (Lee and Pilch, 1994, Am. J. Physiol. 266:C319-C334).

[0006] Insulin-like growth factor 1 (IGF-1) is a small, single-chain protein (MW=7,500 Da) that is involved in many aspects of tissue growth and repair. It is similar in size, sequence, and structure to insulin, but has 100-1,000-fold lower affinity for IR (Mynarcik et al., 1997, J. Biol. Chem. 272:18650-18655). Although IGF-1 mRNA can be detected in many tissues, the majority of circulating IGF-1 is produced in the liver after stimulation by growth hormone (Butt et al., 1999, Immunol. Cell Biol. 77:256-262). Functionally, IGF-1 appears to act as a mitogen and as an anti-apoptotic factor for cells.

[0007] Recent studies have analyzed the role of endogenous IGF-1 in various disease states. Several reports have shown that IGF-1 promotes the growth of normal and cancerous prostate cells both in vitro and in vivo (Angelloz-Nicoud and Binoux, 1995, Endocrinol. 136:5485-5492; Figueroa et al., 1995, J. Clin. Endocrinol. Metab. 80:3476-3482; Torring et al., 1997, J. Urol. 158:222-227). Elevated serum levels of IGF-1 have been shown to be associated with increased risks of prostate cancer, and may be an earlier predictor of onset than prostate-specific antigen (PSA; J. M. Chan et al., 1998, Science 279:563-566). Serum levels of free IGF-1 are regulated by the presence of IGF binding proteins (IGFBP), which bind to IGF-1 and prevent its interaction with the IGF-1R (reviewed in C. A. Conover, 1996, Endocr. J. 43S:S43-S48; Rajaram et al., 1997, Endocr. Rev. 18:801-831). PSA has been shown to be a protease that cleaves IGFBP-3, resulting in an increase of free IGF-1 in serum (P. Cohen et al., 1992, J. Clin. Endocrinol. Metab. 75:1046-1053; P. Cohen et al., 1994, J. Endocrinol. 142:407-415; H. Lilja, 1995, Scand. J. Clin. Lab. Invest. Suppl. 220:47-56). Consistent with this finding, men with higher levels of circulating IGF-1 and lower levels of IGFBP-3 were found to be at higher risk for developing colorectal cancer (J. Ma et al., 1999, J. Natl. Cancer Instit. 91:620-625.). Recent studies have also shown a connection between IGF-1 levels and ovarian cancer.

[0008] There also appears to be a relationship between high levels of IGF-1 and/or IGF-1R and breast cancer (L. C. Happerfield et al., 1997, J. Pathol. 183:412-417). A positive correlation was observed between circulating IGF-1 and breast cancer among pre-menopausal women (S. E. Hankinson et al., 1998, Lancet 351:1393-1396). A poor prognosis for breast cancer patients was correlated to the expression of IGF-1R positive and estrogen receptor (ER) negative cells (A. A. Butler et al., 1998, Cancer Res. 58:3021-3027). Recently, investigators have identified hybrid IGF-1R/IR receptors found in several breast cancer cell lines (G. Pandini et al., 1999, Clin. Cancer Res. 5:1935-1944; E. M. Bailyes et al., 1997, Biochem. J. 327(Pt 1):209-215; see below). The data has suggested that these hybrids behave as functional IGF-1Rs and may play a major role in IGF-1 signaling in breast cancer.

[0009] Clinical studies have also investigated the use of recombinant human IGF-1 in the treatment of several diseases, including type I diabetes (Carroll et al., 1997, Diabetes 46:1453-1458; Crowne et al., 1998, Metabolism 47:31-38), amyotropic lateral sclerosis (Lai et al., 1997, Neurology 49:1621-1630), and diabetic motor neuropathy (Apfel and Kessler, 1996, CIBA Found. Symp. 196:98-108). Other potential therapeutic applications of IGF-1, such as osteoporosis (Canalis, 1997, Bone 21:215-216), immune modulation (Clark, 1997, Endocr. Rev. 18:157-179) and nephrotic syndrome (Feld and Hirshberg, 1996, Pediatr. Nephrol. 10:355-358) are also under investigation. Clearly, IGF-1R activity is involved in many disease states, indicating that there are potential clinical applications for both IGF-1 agonists and antagonists.

[0010] Both insulin and IGF-1 are expressed as precursor proteins comprising, among other regions, contiguous A, B, and C peptide regions, with the C peptide being an intervening peptide connecting the A and B peptides. A mature insulin molecule is composed of the A and B chains connected by disulfide bonds, where the connecting C peptide has been removed during post-translational processing. IGF-1 retains its smaller C-peptide as well as a small D extension at the C-terminal end of the A chain, making the mature IGF-1 slightly larger than insulin (Blakesley, 1996). The C region of human IGF-1 appears to be required for high affinity binding to IGF-1R (Pietrzkowski et al., 1992, Cancer Res. 52(23):6447-51). Specifically, tyrosine 31 located within this region appears to be essential for high affinity binding. Furthermore, deletion of the D domain of IGF-1 increased the affinity of the mutant IGF-1 for binding to the IR, while decreasing its affinity for the IGF-1R (Pietrzkowski et al., 1992). A further distinction between the two hormones is that, unlike insulin, IGF-1 has very weak self-association and does not hexamerize (De Meyts, 1994).

[0011] IGF-1 and insulin competitively cross-react with IGF-1R and IR (L. Schäffer, 1994, Eur. J. Biochem. 221:1127-1132). Yet, despite 45% overall amino acid identity, insulin and IGF-1 bind only weakly to each other's receptor. The affinity of each peptide for the non-cognate receptor is about 3 orders of magnitude lower than that for the cognate receptor (Mynarcik, et al., 1997, J. Biol. Chem. 272:18650-18655). The differences in binding affinities may be partly explained by the differences in amino acids and unique domains which contribute to unique tertiary structures of ligands (Blakesley et al., 1996, Cytokine Growth Factor Rev. 7(2):153-9).

[0012] IGF-1R and IR are related members of the tyrosine-kinase receptor superfamily of growth factor receptors. Another family member is insulin-related receptor (IRR), for which no natural ligand is known. Both IGF-1R and IR are comprised of two α and two β subunits which form a disulfide-linked heterotetramer (β-α-α-β). These receptors have an extracellular ligand binding domain, a single transmembrane domain, and a cytoplasmic domain displaying the tyrosine kinase activity. The extracellular domain is composed of the entire α subunits and a portion of the N-terminus of the β subunits, while the intracellular portion of the β subunits contains the tyrosine kinase domain. In contrast to other tyrosine kinase receptors, IGF-1R, IR and IRR exist on the cell surface as disulphide-linked dimers and require domain rearrangements rather than receptor oligomerization for cell signaling (Adams et al., 2000, Cell. Mol. Life. Sci. 57:1050-1093; Garrett et al., 1998, Nature 394:395-399; Frasca et al., 1999, Mol. Cell. Biol. 19: 3278-3288; De Meyts et al., 1994, Hormone Res. 42:152-169). In addition, insulin and IGF-1 hemireceptors (comprising one α subunit and one β subunit) can heterodimerize to form IR/IGF-1R hybrids (M. A. Soos et al., 1990, Biochem. J. 270:383-390; J. Kasua et al., 1993, Biochemistry 32:13531-13536; B. L. Seely et al., 1995, Endocrinology 136:1635-1641).

[0013] In many cells, IR/IGF-1R hybrids are the most common receptor subtype (Bailyes et al., 1997, Biochem. J. 327(pt. 1):209-215). The proportion of total IGF-1R assembled into hybrids varies between 40% and 60% in human tissues (M. Federici et al., 1997, Mol. Cell. Endocrin. 129(2):121-6). IR/IGF-1R hybrids are also overproduced in human cancer cells as a result of overexpression of IR and IGF-1R (Pandini et al., 1999, Clin. Cancer Res. 5:1935-1944; A. Belfiore et al., 1999, Biochemie, 81(4):403-7; V. Papa et al., 1990, J. Clin. Invest. 86:1503-1510; V. Papa et al., 1993, Cancer Res. 53:3736-3740). In particular, increased levels of IR/IGF-1R hybrids have been observed in breast cancer cell lines and breast cancer tissue specimens (Pandini et al., 1999, Clin. Cancer Res. 5:1935-1944). Similarly, high levels of IR/IGF-1R hybrids have been observed in thyroid cancer specimens and cell lines (A. Belfiore et al., 1999, Biochemie, 81(4):403-7). Functional studies have indicated that IR/IGF-1R hybrids are predominantly activated by IGF-1 (M. A. Soos et al., 1993, Biochem. J. 290(pt. 2):419-426; A. L. Frattali et al., 1993, J. Biol. Chem. 268:7393-7400). Accordingly, it has been postulated that IR/IGF-1R hybrids provide additional binding sites for IGF-1, and thereby increase cell sensitivity to this factor (Bailyes et al., 1997, Biochem. J. 327(pt. 1):209-215; Pandini et al., 1999, Clin. Cancer Res. 5:1935-1944; A. Belfiore et al., 1999, Biochemie, 81(4):403-7).

[0014] IR is a glycoprotein having molecular weight of 350-400 kDa (depending of the level of glycosylation). It is synthesized as a single polypeptide chain and proteolytically cleaved to yield a disulfide-linked monomer α-β insulin receptor. Two α-β monomers are linked by disulfide bonds between the α-subunits to form a dimeric form of the receptor (β-α-α-β-type configuration). The α subunit is comprised of 723 amino acids, and it can be divided into two large homologous domains, L1 (amino acids 1-155) and L2 (amino acids 313-468), separated by a cysteine-rich region (amino acids 156-312) (Ward et al., 1995, Prot. Struct. Funct. Genet. 22:141-153). Many determinants of insulin binding seem to reside in the α-subunit. The β-subunit of IR has 620 amino acid residues and three domains: extracellular, transmembrane, and cytosolic. The extracellular domain is linked by disulfide bridges to the α-subunit. The cytosolic domain includes the tyrosine kinase domain, the three-dimensional structure of which has been solved (Hubbard et al., 1994, Nature 372:746-754). A unique feature of IR is that it is dimeric in the absence of ligand.

[0015] To aid in drug discovery efforts, a soluble form of a membrane-bound receptor was constructed by replacing the transmembrane domain and the intracellular domain of IR with constant domains from immunoglobulin Fc or λ subunits (Bass et al., 1996, J. Biol. Chem. 271:19367-19375). The recombinant gene was expressed in human embryonic kidney 293 cells. The expressed protein was a fully processed heterotetramer and the ability to bind insulin was similar to that of the full-length holoreceptor.

[0016] IGF-1R is synthesized as a 180 kDa precursor which is glycosylated, dimerized and proteolytically processed to yield mature receptor (T. E. Adams et al., 2000, Cell. Mol. Life Sci., 57:1050-1093, 2000). The mature receptor/complex consists of two extracellular α-subunits and two transmembrane β-subunits having tyrosine kinase activity. IGF-1R is expressed in almost all normal adult tissue except for liver, which is itself the major site of IGF-1 production (Butt et al., 1999, Immunol. Cell Biol. 77:256-262). A variety of signaling pathways are activated following binding of IGF-1 to the IGF-1R, including Src and ras, as well as downstream pathways, such as the MAP kinase cascade and the PI3K/AKT axis (Chow et al., 1998, J. Biol. Chem. 273:4672-4680).

[0017] The sequence of IR is highly homologous to the sequence of IGF-1R, indicating that the three-dimensional structures of both receptors may be similar. The α-subunits, which contain the ligand binding region of IR and IGF-1R, exhibit between 47-67% overall amino acid identity. Three general domains, termed L1, cysteine-rich, and L2, have been reported for both receptors from sequence analysis of the α subunits. The cysteine residues in the cysteine-rich region are highly conserved between the two receptors; however, the cysteine-rich regions share only 48% overall amino acid identity. Notably, the crystal structure of the first three domains of IGF-1R has been determined (Garrett et al., 1998, Nature 394:395-399). The L domains consist of a single-stranded right-handed β-helix (a helical arrangement of β-strands), while the cysteine-rich region is composed of eight disulfide-bonded modules.

[0018] While similar in structure, IGF-1R and IR serve different physiological functions. IR is primarily involved in metabolic functions whereas IGF-1R mediates growth and differentiation. Consistent with this, ablation of IGF-1 (i.e., in IGF-1 knock-out mice) results in embryonic growth deficiency, impaired postnatal growth, and infertility. In addition, IGF-1R knock-out mice were only 45% of normal size and died of respiratory failure at birth (Liu et al., 1993, Cell 75:59-72). However, both insulin and IGF-1 can induce both mitogenic and metabolic effects. Whether each ligand elicits both activities via its own receptor, or whether insulin exerts its mitogenic effects through its weak affinity binding to IGF-1R, and IGF-1 its metabolic effects through IR, remains controversial (De Meyts, 1994, Horm. Res. 42:152-169).

[0019] Also, despite the similarities observed between these two receptors, the role of the domains in specific ligand binding are distinct. Through chimeric receptor studies, (domain swapping of the IR and IGF-1R α-subunits), researchers have reported that the sites of interaction of the ligands with their specific receptors differ (T. Kjeldsen et al., 1991, Proc. Natl. Acad. Sci. USA 88:4404-4408; A. S. Andersen et al., 1992, J. Biol. Chem. 267:13681-13686). For example, the cysteine-rich domain of the IGF-1R was determined to be essential for high-affinity IGF binding, but not insulin binding. When amino acids 191-290 of IGF-1R region was introduced into the corresponding region of the IR (amino acids 198-300), the modified IR bound both IGF-1 and insulin with high affinity. Conversely, when the corresponding region of the IR was introduced into the IGF-1R, the modified IGF-1R bound to IR but not IGF-1.

[0020] A further distinction between the binding regions of the IR and IGF-1R is their differing dependence on the N-terminal and C-terminal regions. Both the N-terminal and C-terminal regions (located within the putative L1 and L2 domains) of the IR are important for high-affinity insulin binding but appear to have little effect on IGF-1 binding for either IR or IGF-1R. Replacing residues in the N-terminus of IGF-1R (amino acids 1-62) with the corresponding residues of IR (amino acids 1-68) confers insulin-binding ability on IGF-1R. Within this region, residues Phe-39, Arg-41 and Pro-42 are reported as major contributors to the interaction with insulin (Williams et al., 1995). When these residues are introduced into the equivalent site of IGF-1R, the affinity for insulin is markedly increased, whereas, substitution of these residues by alanine in IR results in markedly decreased insulin affinity. Similarly, the region between amino acids 704-717 of the C-terminus of IR has been shown to play a major role in insulin specificity. Substitution of these residues with alanine also disrupts insulin binding (Mynarcik et al., 1996, J. Biol. Chem. 271(5):2439-42; C. Kristensen et al., 1999, J. Biol. Chem. 274(52):37351-37356).

[0021] Alanine scans of IR and IGF-1R suggest that insulin and IGF-1 may use some common contacts to bind to IGF-1R but that those contacts differ from those that insulin utilizes to bind to IR (Mynarcik et al., 1997). Hence, the data in the literature has led one commentator to state that even though “the binding interfaces for insulin and IGF-1 on their respective receptors may be homologous within this interface the side chains which make actual contact and determine specificity may be quite different between the two ligand-receptor systems” (De Meyts, 1994).

[0022] Based on data for binding of insulin and insulin analogs to various insulin receptor constructs, a binding model has been proposed. This model shows insulin receptor with two insulin binding sites that are positioned on two different surfaces of the receptor molecule, such that each alpha-subunit is involved in insulin binding. In this way, activation of the insulin receptor is believed to involve cross-connection of the alpha-subunits by insulin. A similar mechanism may operate for IGF-1R, but one of the receptor binding interactions appears to be different (Schäffer, 1994, Eur. J. Biochem. 221:1127-1132).

[0023] The identification of molecular structures having a high degree of specificity for one or the other receptor is important to developing efficacious and safe therapeutics. For example, a molecule developed as an insulin agonist should have little or no IGF-1 activity in order to avoid the mitogenic activity of IGF-1 and a potential for facilitating neoplastic growth. It is therefore important to determine whether insulin and IGF-1 share common three-dimensional structures but which have sufficient differences to confer selectivity for their respective receptors. Similarly, it would be desirable to identify other molecular structures that mimic the active binding regions of insulin and/or IGF-1 and which impart selective agonist or antagonist activity.

[0024] Although certain proteins are important drugs, their use as therapeutics presents several difficult problems, including the high cost of production and formulation, administration usually via injection and limited stability in the bloodstream. Therefore, replacing proteins, including insulin or IGF-1, with small molecular weight drugs has received much attention. However, to date, none of these efforts has resulted in finding an effective drug replacement.

[0025] Peptides mimicking functions of protein hormones have been previously reported. Yanofsky et al. (1996, Proc. Natl. Acad. Sci. USA 93:7381-7386) reported the isolation of a monomer antagonistic to IL-1 with nanomolar affinity for the IL-1 receptor. This effort required construction and use of many phage displayed peptide libraries and sophisticated phage-panning procedures.

[0026] Wrighton et al. (1996, Science 273:458-464) and Livnah et al. (1996, Science 273:464-471) reported dimer peptides that bind to the erythropoietin (EPO) receptor with full agonistic activity in vivo. These peptides are cyclical and have intra-peptide disulfide bonds; like the IL-1 receptor antagonist, they show no significant sequence identity to the natural ligand. Importantly, X-ray crystallography revealed that it was the spontaneous formation of non-covalent peptide homodimer peptides that enabled the dimerization two EPO receptors.

[0027] WO 96/04557 reported the identification of peptides and antibodies that bound to active sites of biological targets, which were subsequently used in competition assays to identify small molecules that acted as agonist or antagonists at the biological targets. Renchler et al. (1994, Proc. Natl. Acad. Sci. USA 91:3623-3627) reported synthetic peptide ligands of the antigen binding receptor that induced programmed cell death in human B-cell lymphoma.

[0028] Most recently, Cwirla et al. (1997, Science 276:1696-1698) reported the identification of two families of peptides that bound to the human thrombopoietin (TPO) receptor and were competed by the binding of the natural TPO ligand. The peptide with the highest affinity, when dimerized by chemical means proved to be as potent an in vivo agonist as TPO, the natural ligand.

### V. SUMMARY OF THE INVENTION

[0029] This invention relates to the identification of amino acid sequences that specifically recognize sites involved in IR or IGF-1R activation. Specific amino acid sequences are identified and their agonist or antagonist activity at IR and/or IGF-1R has been determined. Such sequences may be developed as potential therapeutics or as lead compounds to develop other more efficacious ones. In addition, these sequences may be used in high-throughput screens to identify and provide information on small molecules that bind at these sites and mimic or antagonize the functions of insulin or IGF-1. Furthermore, the peptide sequences provided by this invention can be used to design secondary peptide libraries, which can be used to identify sequence variants that increase or otherwise modulate the binding and/or activity of the original peptide at IR or IGF-1R. The peptide sequences of the invention can also be combined to make dimer or other multimeric peptides, which can be used for screening, diagnostic, and therapeutic applications as described herein.

[0030] In one aspect of this invention, large numbers of peptides have been screened for their IR and IGF-1R binding and activity characteristics. Analysis of their amino acid sequences has identified certain consensus sequences which may be used themselves or as core sequences in larger amino acid sequences conferring upon them agonist or antagonist activity. Several generic amino acid sequences are disclosed which bind IR and/or IGF-1R with varying degrees of agonist or antagonist activity depending on the specific sequence of the various peptides identified within each motif group. Also provided are amino or carboxyl terminal extensions capable of modifying the affinity and/or pharmacological activity of the consensus sequences when part of a larger amino acid sequence. Further provided are peptides containing more than one consensus sequence (e.g., dimer peptides).

[0031] The amino acid sequences of this invention which bind IR and/or IGF-1R include:

[0032] a. X₁ X₂ X₃ X₄ X₅ wherein X₁, X₂, X₄ and X₅ are aromatic amino acids, and X₃ is any polar amino acid (Formula 1; Group 1; A6 motif);

[0033] b. X₆ X₇ X₈ X₉ X₁₀ X₁₁ X₁₂ X₁₃ wherein X₆ and X₇ are aromatic amino acids, X₈, X₉, X₁₁ and X₁₂ are any amino acid, and X₁₀ and X₁₃ are hydrophobic amino acids (Formula 2; Group 3; B6 motif);

[0034] c. X₁₄ X₁₅ X₁₆ X₁₇ X₁₈ X₁₉ X₂₀ X₂₁ wherein X₁₄, and X₁₇ are hydrophobic amino acids, X₁₅, X₁₆, X₁₈ and X₁₉ are any amino acid, and X₂₀ and X₂₁ are aromatic amino acids (Formula 3; reverse B6; revB6).

[0035] d. X₂₂ X₂₃ X₂₄ X₂₅ X₂₆ X₂₇ X₂₈ X₂₉ X₃₀ X₃₁ X₃₂ X₃₃ X₃₄ X₃₅ X₃₆ X₃₇ X₃₈ X₃₉ X₄₀ X₄₁ wherein X₂₂, X₂₅, X₂₈, X₂₉, X₃₀, X₃₃, X₃₄, X₃₅, X₃₆, X₃₇, X₃₈, X₄₀, and X₄₁ are any amino acid, X₃₅ and X₃₇ may be any amino acid for binding to IR, whereas X₃₅ is preferably a hydrophobic amino acid and X₃₇ is preferably glycine for binding to IGF-1R and possess agonist or antagonist activity. X₂₃ and X₂₆ are hydrophobic amino acids. This sequence further comprises at least two cysteine residues, preferably at X₂₅ and X₄₀ X₃₁ and X₃₂ are small amino acids (Formula 4; Group 7; E8 motif).

[0036] e. X₄₂ X₄₃ X₄₄ X₄₅ X₄₆ X₄₇ X₄₈ X₄₉ X₅₀ X₅₁ X₅₂ X₅₃ X₅₄ X₅₅ X₅₆ X₅₇ X₅₈ X₅₉ X₆₀ X₆₁ wherein X₄₂, X₄₃, X₄₄, X₄₅, X₅₃, X₅₅, X₅₆, X₅₈, X₆₀ and X₆₁ may be any amino acid, X₄₃, X₄₆, X₄₉, X₅₀, X₅₄ are hydrophobic amino acids, X₄₇ and X₅₉ are preferably cysteines, X₄₈ is a polar amino acid, and X₅₁, X₅₂ and X₅₇ are small amino acids (Formula 5; mini F8 motif).

[0037] f. X₆₂ X₆₃ X₆₄ X₆₅ X₆₆ X₆₇ X₆₈ X₆₉ X₇₀ X₇₁ X₇₂ X₇₃ X₇₄ X₇₅ X₇₆ X₇₇ X₇₈ X₇₉ _{X80} X₈₁ wherein X₆₂, X₆₅, X₆₈, X₆₉, X₇₁, X₇₃, X₇₆, X₇₇, X₇₈, X₈₀, and X₈₁ may be any amino acid; X₆₃, X₇₀, X₇₄ are hydrophobic amino acids; X₆₄ is a polar amino acid, X₆₇ and X₇₅ are aromatic amino acids and X₇₂ and X₇₉ are preferably cysteines capable of forming a loop (Formula 6; Group 2; D8 motif).

[0038] g. H X₈₂ X₈₃ X₈₄ X₈₅ X₈₆ X₈₇ X₈₈ X₈₉ X₉₀ X₉₁ X₉₂ wherein X₈₂ is proline or alanine, X₈₃ is a small amino acid, X₈₄ is selected from leucine, serine or threonine, X₈₅ is a polar amino acid, X₈₆, X₈₈, X₈₉ and X₉₀ are any amino acid, and X₈₇, X₉₁ and X₉₂ are an aliphatic amino acid (Formula 7).

[0039] h. X₁₀₄ X₁₀₅ X₁₀₆ X₁₀₇ X₁₀₈ X₁₀₉ X₁₁₀ X₁₁₁ X₁₁₂ X₁₁₃ X₁₁₄ wherein at least one of the amino acids of X₁₀₆ through X₁₁₁, and preferably two, are tryptophan separated by three amino acids, and wherein at least one of X₁₀₄, X₁₀₅ and X₁₀₆ and at least one of X₁₁₂, X₁₁₃ and X₁₁₄ are cysteine (Formula 8); and

[0040] i. an amino acid sequence comprising the sequence JBA5: DYKDLCQSWGVRIGWLAGLCPKK (SEQ ID NO:1541) or JBA5 minus FLAG® tag and terminal lysines: LCQSWGVRIGWLAGLCP (SEQ ID NO:1542) (Formula 9).

[0041] j. W X₁₂₃ G Y X₁₂₄ W X₁₂₅ X₁₂₆ (SEQ ID NO:1543) wherein X₁₂₃ is selected from proline, glycine, serine, arginine, alanine or leucine, but more preferably proline; X₁₂₄ is any amino acid, but preferably a charged or aromatic amino acid; X₁₂₅ is a hydrophobic amino acid preferably leucine or phenylalanine, and most preferably leucine. X₁₂₆ is any amino acid, but preferably a small amino acid (Formula 10; Group 6 motif).

[0042] In one embodiment, peptides comprising a preferred amino acid sequence FYX₃ WF (SEQ ID NO:1544) (Formula 1; Group 1; A6 motif) have been identified which competitively bind to sites on IR. Surprisingly, peptides comprising an amino acid sequence FYX₃ WF (SEQ ID NO:1544) can possess agonist or antagonist activity at IR or IGF-1R.

[0043] This invention also identifies at least two distinct binding sites on IR and IGF-1R (Site 1 and Site 2) based on the differing ability of certain of the peptides to compete with one another and ligand for binding to IR or IGF-1R. Accordingly, this invention provides amino acid sequences that bind specifically to one or both sites of IR or IGF-1R. Furthermore, specific amino acid sequences are provided which have agonist or antagonist characteristics based on their ability to bind to the specific sites of IR or IGF-1R.

[0044] In another embodiment of this invention, amino acid sequences which bind to one or more sites of IR or IGF-1R (e.g., Site 1 or Site 2) are covalently linked together to form multivalent ligands. These multivalent ligands are capable of forming complexes with a plurality of IR or IGF-1R. Either the same or different amino acid sequences are covalently bound together to form homo- or heterocomplexes.

[0045] In various aspects of the invention, monomer subunits are covalently linked at their N-termini or C-termini to form N-N, C-C, N-C, or C-N linked dimer peptides. In one example, dimer peptides are used to form receptor complexes bound through the same corresponding sites, e.g., Site 1-Site 1 or Site 2-Site 2 dimers. Alternatively, heterodimer peptides are used to bind to different sites on one receptor or to cause receptor complexing through different sites, e.g., Site 1-Site 2 or Site 2-Site 1 dimers. In one novel aspect of the invention, Site 2-Site 1 dimers find use as insulin agonists, while certain Site 1-Site 2 dimers find use as insulin antagonists.

[0046] In various embodiments, insulin agonists comprise Site 1-Site 1 dimer peptide sequences S325, S332, S333, S335, S337, S353, S374-S376, S378, S379, S381, S414, S415, and S418; whereas other insulin agonists comprise Site 2-Site 1 dimer peptide sequences S455, S457, S458, S467, S468, S471, S499, S510, S518, S519, and S520, as described herein below. In one preferred embodiment, an insulin agonist comprises the sequence of the S519 dimer peptide, which shows insulin-like activity in both in vitro and in vivo assays.

[0047] The present invention also provides assays for identifying compounds that mimic the binding characteristics of insulin or IGF-1. Such compounds may act as antagonists or agonists of insulin or IGF-1 function in cell based assays.

[0048] This invention further provides kits for identifying compounds that bind to IR and/or IGF-1R. Also provided are therapeutic compounds that bind the insulin receptor or the IGF-1 receptor.

[0049] Other embodiments of this invention are the nucleic acid sequences encoding the amino acid sequences of the invention. Also within the scope of this invention are vectors containing the nucleic acids and host cells which express the nucleic acids encoding the amino acid sequences which bind at IR and/or IGF-1R and possess agonist or antagonist activity.

[0050] This invention also provides amino acid sequences that bind to active sites of IR and/or IGF-1R and to identify structural criteria for conferring agonist or antagonist activity at IR or IGF-1R.

[0051] This invention further provides specific amino acid sequences that possess agonist, partial agonist, or antagonist activity at either IR or IGF-1R. Such amino acid sequences are potentially useful as therapeutics themselves or may be used to identify other molecules, especially small organic molecules, which possess agonist or antagonist activity at IR or IGF-1R.

[0052] In addition, the present invention provides structural information derived from the amino acid sequences of this invention, which may be used to construct other molecules possessing the desired activity at the relevant IR binding site.

### VI. BRIEF DESCRIPTION OF THE DRAWINGS

[0053] FIGS. 1A-1O; 2A-2E; 3A-3E; 4A-4I; 43A-43B, 44A-44B: Amino acid sequences identified by panning peptide libraries against IGF-1R and/or IR. The amino acids are represented by their one-letter abbreviation. The ratios over background are determined by dividing the signal at 405 nm (E-Tag, IGF-1R, or IR) by the signal at 405 nm for non-fat milk. The IGF-1R/IR Ratio Comparison is determined by dividing the ratio of IGF-1R by the ratio of IR. The IR/IGF-1R Ratio Comparison is determined by dividing the ratio of IR by the ratio of IGF-1R. HIT indicates binder; CAND indicates binder candidate; LDH indicates binding to lactate dehydrogenase (negative control); Sp/Irr indicates the ratio of specific binding over non-specific binding.

[0054] The design of each library is shown in the first line in bold. In the design, symbol ‘X’ indicates a random position, an underlined amino acid indicates a doped position at the nucleotide level, and other positions are held constant. Additional abbreviations in the B6H library are: ‘O’ indicates an NGY codon where Y is C or T; ‘J’ indicates an RHR codon where R is A or G, and H is A, C, or T; and ‘U’ indicates an VVY codon where V is A, C, or G, and Y is C or T. The ‘h’ in the 20E2 libraries indicates an NTN codon.

[0055] Symbols in the listed sequences include: Q indicates a position corresponding to a TAG stop codon; # indicates a position corresponding to a TAA stop codon; * indicates a position corresponding to a TGA stop codon; and ? indicates an unknown amino acid. It is believed that a W replaces the TGA stop codon when expressed. The Q residues represent translation read-through at TAG stop codons. Except for the 20C and A6L libraries, all libraries are designed with the short FLAG® epitope DYKD (SEQ ID NO:1545; Hopp et al., 1988, Bio/Technology 6:1205-1210) at the N-terminus of the listed sequence and AAAGAP (SEQ ID NO:1546) at the C-terminus. The 20C and A6L libraries have the full length FLAG® epitope DYKDDDDK (SEQ ID NO:1547).

[0056] FIG. 1A: Formula 1 motif peptide sequences obtained from a random 40mer library panned against IR (SEQ ID NOS:1-3).

[0057] FIG. 1B: Formula 1 motif peptide sequence obtained from a random 40mer library panned against IGF-1R (SEQ ID NOS:4-6).

[0058] FIG. 1C: Formula 1 motif peptide sequences obtained from a random 20mer library panned against IR (SEQ ID NOS:7-29).

[0059] FIG. 1D: Formula 1 motif peptide sequences obtained from a random 20mer library panned against IGF-1R (SEQ ID NOS:30-33).

[0060] FIG. 1E: Formula 1 motif peptide sequences obtained from a 21mer library constructed to contain X₁₋₁₀NFYDWFVX₁₈₋₂₁ (SEQ ID NO:34; also referred to as “A6S”) panned against IR (SEQ ID NOS:35-98).

[0061] FIG. 1F: Formula 1 motif peptide sequences obtained from a 21mer library constructed to contain X₁₋₁₀NFYDWFVX₁₈₋₂₁ (SEQ ID NO:34; also referred to as “A6S”) panned against IGF-1R (SEQ ID NOS:99-166).

[0062] FIG. 1G: Formula 1 motif peptide sequences obtained from a library constructed to contain variations outside the consensus core of the A6 peptide as indicated (referred to as “A6L” (SEQ ID NO:167)) panned against IR (SEQ ID NOS:168-216).

[0063] FIG. 1H: Formula 1 motif peptide sequences obtained from a library constructed to contain variations outside the consensus core of the A6 peptide as indicated (referred to as “A6L” (SEQ ID NO:167)) panned against IGF-1R (SEQ ID NOS:217-244).

[0064] FIG. 1I: Formula 1 motif peptide sequences obtained from a library constructed to contain variations in the consensus core of the E4D peptide (SEQ ID NO:245) (as indicated) panned against IR (SEQ ID NOS:246-305).

[0065] FIG. 1J: Formula 1 motif peptide sequences obtained from a library constructed to contain variations in the consensus core of the E4D peptide (SEQ ID NO:245) (as indicated) panned against IGF-1R (SEQ ID NOS:306-342).

[0066] FIG. 1K: Formula 1 motif peptide sequences obtained from a library constructed using the sequence X₁₋₆FHENFYDWFVRQVSX₂₁₋₂₆ (SEQ ID NO:343; H2C-A) panned against IR (SEQ ID NOS:344-430).

[0067] FIG. 1L: Formula 1 motif peptide sequences obtained from a library constructed using the sequence X₁₋₆FHENFYDWFVRQVSX₂₁₋₂₆ (SEQ ID NO:343; H2C-A) panned against IGF-1R (SEQ ID NOS:431-467).

[0068] FIG. 1M: Formula 1 motif peptide sequences obtained from a library constructed using the sequence X₁₋₆FHXXFYXWFX₁₆₋₂₁ (SEQ ID NO:468; H2C-B) and panned against IR (SEQ ID NOS:469-575).

[0069] FIG. 1N: Formula 1 motif peptide sequences obtained from a library constructed using the sequence X₁₋₆FHXXFYXWFX₁₆₋₂₁ (SEQ ID NO:468; H2C-B) and panned against IGF-1R (SEQ ID NOS:576-657).

[0070] FIG. 1O: Formula 1 motif peptide sequences obtained from other libraries panned against IR (SEQ ID NOS:658-712).

[0071] FIG. 2A: Formula 4 motif peptide sequences identified from a random 20mer library panned against IR (SEQ ID NO:713).

[0072] FIG. 2B: Formula 4 motif peptide sequences identified from a library constructed to contain variations in the F8 peptide (SEQ ID NO:713) as indicated (15% dope; referred to as “F815”) panned against IR (SEQ ID NOS:714-796).

[0073] FIG. 2C: Formula 4 motif peptide sequences identified from a library constructed to contain variations in the F8 peptide (SEQ ID NO:713) as indicated (15% dope; referred to as “F815”) panned against IGF-1R (SEQ ID NOS:797-811).

[0074] FIG. 2D: Formula 4 motif peptide sequences identified from a library constructed to contain variations in the F8 peptide (SEQ ID NO:713) as indicated (20% dope; referred to as “F820”) panned against IR (SEQ ID NOS:812-861).

[0075] FIG. 2E: Formula 4 motif peptide sequences identified from other libraries panned against IR (SEQ ID NOS:862-925).

[0076] FIG. 3A: Formula 6 motif peptide sequences identified from a random 20mer library and panned against IR (SEQ ID NOS:926-928).

[0077] FIG. 3B: Formula 6 motif peptide sequences identified from a library constructed to contain variations in the D8 peptide (SEQ ID NO:929) as indicated (15% dope; referred to as “D815”) panned against IR (SEQ ID NOS:930-967).

[0078] FIG. 3C: Formula 6 motif peptide sequences identified from a library constructed to contain variations in the D8 peptide (SEQ ID NO:929) as indicated (20% dope; referred to as “D820”) panned against IR (SEQ ID NOS:968-1010).

[0079] FIG. 3D: Formula 6 motif peptide sequences identified from a library constructed to contain variations in the D8 peptide (SEQ ID NO:929) as indicated (20% dope; referred to as “D820”) panned against IGF-1R (SEQ ID NOS:1011-1059).

[0080] FIG. 3E: Formula 6 motif peptide sequences identified from other libraries panned against IR (SEQ ID NOS:1060-1061).

[0081] FIG. 4A: Formula 10 motif peptide sequences identified from random 20mer libraries panned against IGF-1R (SEQ ID NOS:1062-1077).

[0082] FIG. 4B: Formula 10 motif peptide sequences identified from random 20mer libraries panned against IR (SEQ ID NOS:1078-1082).

[0083] FIG. 4C: Miscellaneous peptide sequences identified from a random 20mer library panned against IR (SEQ ID NOS:1083-1086).

[0084] FIG. 4D: Miscellaneous peptide sequences identified from a random 40mer library panned against IR (SEQ ID NOS:1087-1088).

[0085] FIG. 4E: Miscellaneous peptide sequences identified from a random 20mer library panned against IGF-1R (SEQ ID NOS:1089-1092).

[0086] FIG. 4F: Miscellaneous peptide sequences identified from an X₁₋₄ C X₆₋₂₀ library and panned against IGF-1R (SEQ ID NOS:1093-1113).

[0087] FIG. 4G: Miscellaneous peptide sequences identified from a library constructed to contain variations of the F8 peptide (SEQ ID NO:1114) as indicated (F815) panned against IGF-1R (SEQ ID NOS:1115-1118).

[0088] FIG. 4H: Miscellaneous peptide sequences identified from a library constructed to contain variations in the F8A11 peptide (SEQ ID NO:1119) as indicated (referred to as “NNKH”) panned against IR (SEQ ID NOS:1120-1142).

[0089] FIG. 4I: Miscellaneous peptide sequences identified from a library constructed to contain variations in the F8A11 peptide (SEQ ID NO:1119) as indicated (referred to as “NNKH”) panned against IGF-1R (SEQ ID NOS:1143-1154).

[0090] FIG. 5A: Summary of specific representative amino acid sequences from Formulas 1, 4, 6, and 10 (SEQ ID NOS:1155-1180).

[0091] FIG. 5B: Summary of specific representative amino acid sequences from Formulas 1, 4, 6, and 10 (SEQ ID NOS:1181-1220).

[0092] FIG. 6: Illustration of 2 binding site domains on IR based on competition data.

[0093] FIG. 7: Schematic illustration of potential binding schemes to the multiple binding sites on IR.

[0094] FIG. 8: Biopanning results and sequence alignments of Group 1 of IR-binding peptides (SEQ ID NOS:1221-1243). The number of sequences found is indicated on the right side of the figure together with data on the phage binding to either IR or IGF-1R receptor. Absorbance signals are indicated by: ++++, >30X over background; +++, 15-30X; ++, 5-15X; +, 2-5X; and 0, <2X.

[0095] FIGS. 9A-9B: Biopanning results and sequence alignments of Groups 2, 6, and 7 of IR-binding peptides (SEQ ID NOS:1244-1261). The number of sequences found is indicated on the right side of the figure together with data on the phage binding to either IR or IGF-1R receptor. Absorbance signals are indicated by: ++++, >30X over background; +++, 15-30X; ++, 5-15X; +, 2-5X; and 0, <2X.

[0096] FIGS. 10A-10C: Insulin competition data determined for various monomer and dimer peptides. FIG. 10A shows the competition curve. FIG. 10B shows the symbol key for the peptides. FIG. 10C shows the description of the peptides.

[0097] FIGS. 11A-11D: Insulin competition data determined for various monomer and dimer peptides. FIG. 11A shows the competition curve. FIG. 11B shows the symbol key for the peptides. FIG. 11C shows the description of the peptides. FIG. 11D shows IR binding affinity for the peptides.

[0098] FIGS. 12A-12D: Results of free fat cell assays for truncated synthetic RP9 monomer peptides, S390 and S394. FIG. 12A shows the results for peptide S390. FIG. 12B shows the results for peptide S394. FIG. 12C shows the amino acid sequence of peptides S390 and S394 (SEQ ID NOS:1794 and 1788, respectively in order of appearance). FIG. 12D shows the results for full-length RP9 peptide.

[0099] FIGS. 13A-13C: Results of free fat cell assays for truncated synthetic RP9 dimer peptides, S415 and S417. FIG. 13A shows the results for peptide S415. FIG. 13B shows the results for peptide S417. FIG. 13C shows the amino acid sequence of peptides S415 and S417 (SEQ ID NOS:1795-1796).

[0100] FIGS. 14A-14C: Results of free fat cell assays for RP9 homodimer peptides, 521 and 535. FIG. 14A shows the results for peptide 521. FIG. 14B shows the results for peptide 535. FIG. 14C shows the amino acid sequence of peptides 521 and 535.

[0101] FIGS. 15A-15C: Results of free fat cell assays for RP9-D8 heterodimer peptides, 537 and 538. FIG. 15A shows the results for peptide 537. FIG. 15B shows the results for peptide 538. FIG. 15C shows the amino acid sequence of peptides 537 and 538.

[0102] FIGS. 16A-16C: Results of free fat cell assays for RP9-D8 heterodimer peptides 537 and 538. FIG. 16A shows the results for peptide 537. FIG. 16B shows the results for peptide 538. FIG. 16C shows the amino acid sequence of peptides 537 and 538.

[0103] FIGS. 17A-17B: Results of free fat cell assays for D8-RP9 heterodimer peptide, 539. FIG. 17A shows the results for peptide 539. FIG. 17B shows the amino acid sequence of peptide 539.

[0104] FIGS. 18A-18D: Results of free fat cell assays for Site 1/Site 2 dimer peptides with constituent monomer peptides with Site 1-Site 2 C-N (FIG. 18A), Site 1-Site 2, N—N (FIG. 18B), Site 1-Site 2, C-C (FIG. 18C), and Site 2-Site 1, C-N (FIG. 18D) orientations and linkages, respectively.

[0105] FIGS. 19A-19B: Results of human insulin receptor kinase assays for various monomer and dimer peptides. FIG. 19A shows the substrate phosphorylation curve.

[0106] FIG. 19B shows the EC₅₀ values.

[0107] FIGS. 20A-20B: Results of human insulin receptor kinase assays for Site 1-Site 2 and Site 2-Site 1 dimer peptides. FIG. 20A shows the substrate phosphorylation curve. FIG. 20B shows the EC₅₀ values.

[0108] FIGS. 21A-21B: Results of human insulin receptor kinase assays for Site 1-Site 2 and Site 2-Site 1 peptides. FIG. 21A shows the substrate phosphorylation curve. FIG. 21B shows the EC₅₀ values.

[0109] FIGS. 22A-22B: Results of time-resolved fluorescence resonance transfer assays for assessing the ability of various monomer and dimer peptides to compete with biotinylated RP9 monomer peptide for binding to soluble human insulin receptor-immunoglobulin heavy chain chimera. FIG. 22A shows the binding curve. FIG. 22B shows the symbol key and description of the peptide sequences (SEQ ID NOS:2117, 1916-1917, 1558, 1994, 1960-1961, 2008, 1794, 2015-2016, 1560, and 2001-2002, respectively in order of appearance).

[0110] FIGS. 23A-23C: Results of time-resolved fluorescence resonance transfer assays indicating the ability of various monomer and dimer peptide to compete with biotinylated S175 monomer peptide or biotinylated RP9 monomer peptide for binding to soluble human insulin receptor-immunoglobulin heavy chain chimera. FIGS. 23A-23B show the binding curves. FIG. 23C shows the symbol key and description of the peptide sequences (SEQ ID NOS:2117, 1916-1917, 1558, 1994, 1960-1961, 2008, 1794, 2015-2016, 1560, and 2001-2002, respectively in order of appearance).

[0111] FIGS. 24A-24B: Results of fluorescence polarization assays indicating the ability of various monomer and dimer peptide to compete with fluoroscein labeled RP9 monomer peptide for binding to soluble human insulin receptor ectodomain. FIG. 24A shows the binding curve. FIG. 24B shows the symbol key and description of the peptide sequences (SEQ ID NOS:2117, 1916-1917, 1558, 1994, 1960-1961, 2008, 1794, 2015-2016, 1560 and 2001-2002, respectively in order of appearance).

[0112] FIGS. 25A-25B: Results of fluorescence polarization assays indicating the ability of various monomer and dimer peptides to compete with fluoroscein labeled RP9 monomer peptide for binding to soluble human insulin mini-receptor. FIG. 25A shows the binding curve. FIG. 25B shows the symbol key and description of the peptide sequences (SEQ ID NOS:2117, 1916-1917, 1558, 1994, 1960-1961, 2008, 1794, 2015-2016, 1560, and 2001-2002, respectively in order of appearance).

[0113] FIGS. 26A-26B: Results of fluorescence polarization assays indicating the ability of various monomer and dimer peptides to compete with fluorescein labeled insulin for binding to soluble human insulin receptor ectodomain. FIG. 26A shows the binding curve. FIG. 26B shows the symbol key and description of the peptide sequences (SEQ ID NOS:2117, 1916-1917, 1558, 1994, 1960-1961, 2008, 1794, 2015-2016, 1560, and 2001-2002, respectively in order of appearance).

[0114] FIGS. 27A-27B: Results of fluorescence polarization assays indicating the ability of various monomer and dimer peptides to compete with fluorescein labeled insulin for binding to soluble human insulin mini-receptor. FIG. 27A shows the binding curve. FIG. 27B shows the symbol key and description of the peptide sequences (SEQ ID NOS:2117, 1916-1917, 1558, 1994, 1960-1961, 2008, 1794, 2015-2016, 1560, and 2001-2002, respectively in order of appearance).

[0115] FIG. 28: A schematic drawing for the construction of protein fusions of the maltose binding protein.

[0116] FIG. 29: BIAcore analysis of competition binding between IR and maltose binding protein fusion peptides H2C-9aa-H2C, H2C, and H2C-3aa-H2C.

[0117] FIG. 30: Stimulation of IR autophosphorylation in vivo by maltose binding protein fusion peptides.

[0118] FIGS. 31A-31C: Results of free fat cell assays for insulin and Site 2-Site 1 peptides, S519 and S520. FIG. 31A shows the results for S519. FIG. 31B shows the results for S520. FIG. 31C shows the EC₅₀ values.

[0119] FIGS. 32A-32B: Results of human insulin receptor kinase assays for insulin and Site 2-Site 1 peptides S519 and S520. FIG. 32A shows the substrate phosphorylation curve. FIG. 32B shows the calculated Bestfit values.

[0120] FIG. 33: Results of in vivo experiments showing the effect of intravenous administration of Site 2-Site 1 peptide S519 in Wistar rats:

[0121] FIGS. 34A-34E: Results of phage competition studies with IGF-1 peptides RP9 (Site 1) and D815 (Site 2). Phage: RP9 (A6-like); RP6 (B6-like); D8B12 (Site 2); and D815 (Site 2); Peptides: RP9 and D815. FIGS. 34A-34B show the competition curves. FIGS. 34C-34E show the symbol keys and peptide groups.

[0122] FIG. 35A-35E: Phage competition studies with Site 2-Site 1 dimer peptides containing 6- or 12-amino acid linkers. Phage: RP9, RP6, D8B12, and D815; Peptides: D815-6L-RP9 and D815-12L-RP9. FIGS. 35A-35B show the competition curves. FIGS. 35C-35E show the symbol keys and peptide groups.

[0123] FIG. 36: Results of IGF-1 agonist assay using FDC-P2 cells. Site 1 peptides RP6, RP9, G33, and Site 2 peptide D815 were tested in the agonist assay.

[0124] FIG. 37: Results of IGF-1 antagonist assay using FDCP-2 cells. Site 1 peptides RP6, RP9, G33, and Site 2 peptide D815 were tested in the antagonist assay.

[0125] FIG. 38: Results of IGF-1 agonist assay using FDCP-2 cells. Site 1 peptides 20E2, S175, and RP9 were tested in the agonist assay.

[0126] FIG. 39: Results of agonist and antagonist studies with peptide monomers and dimers. Monomers: D815 and RP9; Dimers: D815-6aa-RP9 and D815-12aa-RP9.

[0127] FIG. 40: Results of agonist and antagonist studies with peptide monomers and dimers. Monomers: G33 and D815; Dimer: D815-6aa-G33.

[0128] FIG. 41: Results of agonist and antagonist studies with peptide monomers and dimers. Monomers: G33, D815 and RP9; Dimers: D815-6aa-RP9 and D815-12aa-RP9.

[0129] FIG. 42: IGF-1 standard curve using FDC-P2 cells.

[0130] FIGS. 43A-43B: Peptide monomers identified from G33 and RP6 secondary libraries panned against IGF-1R (SEQ ID NOS:1262-1432). FIG. 43A shows peptides from G33 secondary library; FIG. 43B shows peptides from RP6 secondary library.

[0131] FIGS. 44A-44B: Peptide dimers identified from libraries panned against IR or IGF-1R (SEQ ID NOS:1433-1540). FIG. 44A shows dimer peptides panned against IR; FIG. 44B shows dimer peptides panned against IGF-1R.

[0132] FIG. 45: Results of heterogeneous time-resolved fluorometric assays showing the effect of recombinant peptide G33 (rG33) on the binding of biotinylated-recombinant human IGF-1 (b-rhIGF-1) to recombinant human IGF-1R (rhIGF-1R).

[0133] FIG. 46: Results of heterogeneous time-resolved fluorometric assays showing the effect of recombinant peptide D815 (rD815) on the binding of biotinylated-recombinant human IGF-1 (b-rhIGF-1) to recombinant human IGF-1R (rhIGF-1R).

[0134] FIG. 47: Results of heterogeneous time-resolved fluorometric assays showing the effect of recombinant peptide RP9 on the binding of biotinylated-recombinant human IGF-1 (b-rhIGF-1) to recombinant human IGF-1R (rhIGF-1R).

[0135] FIG. 48: Results of heterogeneous time-resolved fluorometric assay showing the effect of recombinant peptide D815-6-G33 on the binding of biotinylated-recombinant human IGF-1 (b-rhIGF-1) to recombinant human IGF-1R (rhIGF-1R).

[0136] FIG. 49: Results of heterogeneous time-resolved fluorometric assays showing the effect of recombinant peptide D815-6-RP9 on the binding of biotinylated-recombinant human IGF-1 (b-rhIGF-1) to recombinant human IGF-1R (rhIGF-1R).

[0137] FIG. 50: Results of heterogeneous time-resolved fluorometric assays showing the effect of recombinant peptide D815-12-RP9 on the binding of biotinylated-recombinant human IGF-1 (b-rhIGF-1) to recombinant human IGF-1R (rhIGF-1R).

[0138] FIG. 51: Results of heterogeneous time-resolved fluorometric assays showing the effect of IGF-1 on the binding of biotinylated-recombinant human IGF-1 (b-rhIGF-1) to recombinant human IGF-1R (rhIGF-1R).

[0139] FIG. 52: Results of time-resolved fluorescence resonance energy transfer assays showing the effect of Site 1 peptides, Site 2 peptides, and rhIGF-1 on the dissociation of biotinylated-20E2 (b-20E2, Site 1) from recombinant human IGF-1R.

[0140] FIG. 53: Results of time-resolved fluorescence resonance energy transfer assays showing the effect of various peptide monomers and dimers on the dissociation of biotinylated-20E2 (b-20E2, Site 1) from recombinant human IGF-1R.

[0141] FIGS. 54A-54B, 55A-55B, 56A-56B, 57A-57B, 58A-58B, 59A-59B, 60A-60C, 61A-61B, 62A-62B, 63A-63B, and 64A-64B: Amino acid sequences identified by panning peptide libraries against IGF-1R. The amino acids are represented by their one-letter abbreviation. The ratios over background are determined by dividing the signal at 405 nm (E-Tag, IGF-1R, or IR) by the signal at 405 nm for non-fat milk. The IGF-1R/IR ratio comparison is determined by dividing the ratio of IGF-1R by the ratio of IR. The IR/IGF-1R ratio comparison is determined by dividing the ratio of IR by the ratio of IGF-1R. Sp/Irr=the ratio of specific binding over non-specific binding; LDH=lactate dehydrogenase (negative control).

[0142] Where included, the design of each library is shown in the first line in bold. In the design, symbol ‘X’ indicates a random position, an underlined amino acid indicates a doped position at the nucleotide level, and other positions are held constant. Symbols in the listed sequences include: Q indicates a position corresponding to a TAG stop codon; # indicates a position corresponding to a TAA stop codon; * indicates a position corresponding to a TGA stop codon; and ? indicates an unknown amino acid. The Q residues represent translation read-through at TAG stop codons. All libraries were designed with the short FLAG® Epitope DYKD (SEQ ID NO:1545; Hopp et al., 1988, Bio/Technology 6:1205-1210) at the N-terminus of the listed sequence and an E-tag epitope (GAPVPYPDPLEPR; SEQ ID NO:XX) at the C-terminus.

[0143] FIGS. 54A-54B: Peptides identified from a RP6 secondary library panned against IGF-1R. The RP9 peptide is a Formula 1, Site 1 monomer.

[0144] FIGS. 55A-55B: Peptides identified from a RP9-NPB25 secondary library panned against IGF-1R. The RP9-NPB25 peptide is a Formula 2, Site 1 monomer with a 25 amino acid C-terminal extension.

[0145] FIGS. 56A-56B: Peptides identified from a RP30-IGF-NPB20 secondary library panned against IGF-1R. The RP30-IGF-NPB20 peptide is a Site 1, Formula 2 monomer with a 20 amino acid C-terminal extension.

[0146] FIGS. 57A-57B: Peptides identified from a NPB20-RP30-IGF secondary library panned against IGF-1R. The NPB20-RP30-IGF peptide is a Site 1, Formula 2 monomer with a 20 amino acid N-terminal extension.

[0147] FIGS. 58A-58B: Peptides identified from a D815 secondary library panned against IGF-1R. The D815 peptide is a Formula 6, Site 2 monomer.

[0148] FIGS. 59A-59B: Peptides identified from a RP6-D815 secondary library panned against IGF-1R. The RP6-D815 peptide is a Site 1-Site 2 dimer with no linker.

[0149] FIGS. 60A-60C: Peptides identified from a RP6-6aa-D815 secondary library panned against IGF-1R. The RP6-6aa-D815 peptide is a Site 1-Site 2 dimer with a 6 amino acid linker.

[0150] FIGS. 61A-61B: Peptides identified from a RP6-RP9 secondary library panned against IGF-1R. The RP6-RP9 peptide is a Site 1-Site 1 dimer with no linker.

[0151] FIGS. 62A-62B: Peptides identified from a RP6-6aa-RP9 secondary library panned against IGF-1R. The RP6-6aa-RP9 peptide is a Site 1-Site 1 dimer with a 6 amino acid linker.

[0152] FIGS. 63A-63B: Peptides identified from a D815-RP6 secondary library panned against IGF-1R. The D815-RP6 peptide is a Site 2-Site 1 dimer with no linker.

[0153] FIGS. 64A-64B: Peptides identified from a D815-6aa-RP6 secondary library panned against IGF-1R. The D815-6aa-RP6 peptide is a Site 2-Site 1 dimer with a 6 amino acid linker.

[0154] FIGS. 65A-65F: Dose related increase in cell proliferation of MiaPaCa and MCF-7 cells as measured in response to IGF-1, IGF-2, and insulin. Cells were treated with either IGF-1, IGF-2, or insulin. FIG. 65A: Results for MiaPaCa cells incubated with IGF-1; FIG. 65B: MiaPaCa cells incubated with IGF-2; FIG. 65C: MiaPaCa cells incubated with insulin; FIG. 65D: MCF-7 cells incubated with IGF-1; FIG. 65E: MCF-7 cells incubated with IGF-2; FIG. 65F: MCF-7 cells incubated with insulin.

[0155] FIGS. 66A-66C: Peptide RP33-IGF competes with IGF-1 binding for binding to IGF-1R and antagonizes receptor activity in cell-based assays. For competition experiments, the ALPHAScreen assay format was used (see below). For antagonism assays, RP33-IGF was added to cells, cells were incubated with IGF-1, and cell number was determined. FIG. 66A: Inhibition of IGF-1 binding as a function of RP33-IGF concentration. FIG. 66B: Antagonism of IGF-1R in MCF-7 cells by peptide RP33-IGF. FIG. 66C: Antagonism of IGF-1R in MiaPaCa cells by peptide RP33-IGF.

[0156] FIGS. 67A-67B: IGF-1 stimulates transient phosphorylation of IRS-1 in MCF-7 cells. Cells were stimulated with IGF-1 for 0, 2, 10, 30, 60 minutes and total protein was immunoprecipitated for each analysis. FIG. 67A: Western blot analysis of endogenous IRS-1; FIG. 67B: Western blot analysis of phosphorylated IRS-1; Lane 1: No addition; Lane 2: 2 minute time point; Lane 3: 10 minute time point; Lane 4: 30 minute time point; Lane 5: 60 minute time point.

[0157] FIGS. 68A-68B: Phosphorylation of IRS-1 in MCF-7 cells induced by IGF-1 is dose-dependant. Cells were exposed to increasing concentrations of IGF-1 and total protein was immunoprecipitated. Stimulation by 0.50 nM IGF-1 resulted in a sub-maximal level of phosphorylation that was consistently visualized in Western blot analysis. FIG. 68A: Western blot analysis of endogenous IRS-1; FIG. 68B: Western blot analysis of phosphorylated IRS-1; Lane 1: No addition; Lane 2: 0.05 nM IGF-1; Lane 3: 0.1 nM IGF-1; Lane 4: 5 nM IGF-1; Lane 5: 1 nM IGF-1; Lane 6: 0.5 nM IGF-1; Lane 7: 10 nM IGF-1; Lane 8: 50 nM IGF-1.

[0158] FIGS. 69A-69B: Blockade of IGF-1-induced phosphorylation of IRS-1 in MCF-7 cells by synthetic peptides RP6KK and RP33-IGF. Unrelated peptides KCB1 (VSIGECGGLRHHRVRELCLV; SEQ ID NO:XX) and DGI3-D1 (ECRWFRPWRCPGLLSTGGGR; SEQ ID NO:XX) were used as negative controls. FIG. 69A: Western blot analysis of expressed IRS-1; FIG. 69B: Western blot analysis of phosphorylated IRS-1. Lane 1: no addition; Lane 2: DGI3-D1; Lane 3: KCB1; Lane 4: IGF-1 plus DGI3-D1; Lane 5: IGF-1 plus KCB1; Lane 6: IGF-1 plus RP6KK; Lane 7: IGF-1 plus RP33-IGF; Lane 8: IGF-1.

[0159] FIGS. 70A-70C: Peptides RP54 and RP52 compete with IGF-1 for binding to IGF-1R, and act as antagonists in cell proliferation assays. For antagonism assays, RP54 or RP52 was added to cells, cells were incubated with IGF-1, and cell number was determined. FIG. 70A: Antagonism of IGF-1R by RP54 in MCF-7 cells; FIG. 70B: Antagonism of RP54 in MiaPaCa cells. FIG. 70C: Antagonism of IGF-1 by RP52 in MCF-7 cells.

[0160] FIGS. 71A-71F: Peptide monomers with IGF-1R agonist or antagonist activity in MCF-7 or MiaPaCa cell proliferation assays compete against IGF-1 for binding to IGF-1R. Potencies of peptide competition were determined using the AlphaScreen assay format (see below). FIG. 71A: RP60 peptide; FIG. 71B: RP48 peptide; FIG. 71C: sG33 peptide; FIG. 71D: C1 peptide; FIG. 71E: L-RP9ex peptide; FIG. 71F: 12-RP9ex peptide.

[0161] FIGS. 72A-72E: Peptide dimers with IGF-1R agonist activity in MCF-7 or MiaPaCa cell proliferation assays compete with IGF-1 for binding to IGF-1R. Potencies of peptide competition were determined using the AlphaScreen assay format (see below). FIG. 72A: rRP30-IGF-12-D112 peptide (Site 1-Site 1); FIG. 72B: rRP30-IGF-12-RP31-IGF peptide (Site 1-Site 2); FIG. 72C: rRP31-IGF-12-RP30-IGF peptide (Site 2-Site 1); FIG. 72D: rD112-12-RP30-IGF peptide (Site 1-Site 1); FIG. 72E: rD112-12-D112 peptide (Site 1-Site 1).

[0162] FIGS. 73A-73D: Peptide monomers with IGF-1R agonist activity in MCF-7 or MiaPaCa cell proliferation assays. FIG. 73A: RP60 peptide; FIG. 73B: RP48 peptide; FIG. 73C: G33 peptide; FIG. 73D: L-RP9ex peptide.

[0163] FIGS. 74A-74I: Peptide dimers with IGF-1R agonist activity in MCF-7 or MiaPaCa cell proliferation assays. FIG. 74A: RP30-IGF-12-D112 (Site 1-Site 1); FIG. 74B: RP30-IGF-12-RP31-IGF (Site 1-Site 2); FIG. 74C: RP31-IGF-12-RP30-IGF (Site 2-Site 1); FIG. 74D: D112-12-RP30-IGF (Site 1-Site 1); FIG. 74E: RP6-L-D8B12 (Site 1-Site 2); FIG. 74F: D8B12-12-RP9 (Site 2-Site 1); FIG. 74G: D112-12-D112 (Site 1-Site 1); FIG. 74H: RP9-12-RP9 (Site 1-Site 1); FIG. 74I: RP9-L-RP6 (Site 1-Site 1).

### VII. DETAILED DESCRIPTION OF THE INVENTION

[0164] This invention relates to amino acid sequences comprising motifs that bind to the insulin receptor (IR) and/or insulin-like growth factor receptor (IGF-1R). In addition to binding to IR and/or IGF-1R, the amino acid sequences also possess either agonist, partial agonist or antagonist activity at IR or IGF-1R. In addition, the amino acid sequences bind to separate binding sites (Sites 1 or 2) on IR or IGF-1R.

[0165] Although capable of binding to IR or IGF-1R at sites which participate in conferring agonist or antagonist activity, the amino acid sequences are not based on the native insulin or IGF-1 sequences, nor do they reflect an obvious homology to any such sequences.

[0166] The amino acid sequences of the invention may be peptides, polypeptides, or proteins. These terms as used herein should not be considered limiting with respect to the size of the various amino acid sequences referred to herein and which are encompassed within this invention. Thus, any amino acid sequence comprising at least one of the IR or IGF-1R binding motifs disclosed herein, and which binds to IR or IGF-1R is within the scope of this invention. In preferred embodiments, the amino acid sequences confer insulin or IGF-1 agonist or antagonist activity. The amino acid sequences of the invention are typically artificial, i.e., non-naturally occurring peptides, polypeptides, or fragments thereof. The amino acid sequences of the invention do not include insulin, insulin-like growth factors, antibodies against insulin receptors or insulin-like growth factor receptors, or fragments thereof. Amino acid sequences useful in the invention may be obtained through various means such as chemical synthesis, phage display, cleavage of proteins or polypeptides into fragments, or by any means which amino acid sequences of sufficient length to possess binding ability may be made or obtained.

[0167] The amino acid sequences provided by this invention should have an affinity for IR sufficient to provide adequate binding for the intended purpose. Thus, for use as a therapeutic, the peptide, polypeptide, or protein provided by this invention should have an affinity (K_{d}) of between about 10⁻⁷ to about 10⁻¹⁵ M. More preferably the affinity is 10⁻⁸ to about 10⁻¹² M. Most preferably, the affinity is 10⁻¹⁰ to about 10⁻¹² M. For use as a reagent in a competitive binding assay to identify other ligands, the amino acid sequence preferably has affinity for the receptor of between about 10⁻⁵ to about 10⁻¹² M.

[0168] The present invention describes several different binding motifs, which bind to active sites on IR or IGF-1R. The binding motifs are defined based on the analysis of several different amino acid sequences and analyzing the frequency that particular amino acids or types of amino acids occur at a particular position of the amino acid sequence as described in the related applications of Beasley et al. International Application PCT/US00/08528, filed Mar. 29, 2000, and Beasley et al., U.S. application Ser. No. 09/538,038, filed Mar. 29, 2000.

[0169] Also included within the scope of this invention are amino acid sequences containing substitutions, additions, or deletions based on the teachings disclosed herein and which bind to IR or IGF-1R with the same or altered affinity. For example, sequence tags (e.g., FLAG® tags) or amino acids, such as one or more lysines, can be added to the peptide sequences of the invention (e.g., at the N-terminal or C-terminal ends) as described in detail herein. Sequence tags can be used for peptide purification or localization. Lysines can be used to increase peptide solubility or to allow for biotinylation. Alternatively, amino acid residues located at the carboxy and amino terminal regions of the consensus motifs described below, which comprise sequence tags (e.g., FLAG® tags), or which contain amino acid residues that are not associated with a strong preference for a particular amino acid, may optionally be deleted providing for truncated sequences. Certain amino acids (e.g., C-terminal or N-terminal residues) such as lysine which promote the stability or biotinylation of the amino acids sequences may be deleted depending on the use of the sequence, as for example, expression of the sequence as part of a larger sequence which is soluble, or linked to a solid support.

[0170] Peptides that bind to IR or IGF-1R, and methods and kits for identifying such peptides, have been disclosed by Beasley et al., International Application PCT/US00/08528 filed Mar. 29, 2000 and Beasley et al., U.S. application Ser. No. 09/538,038 filed Mar. 29, 2000, which are incorporated by reference in their entirety.

[0171] A. Consensus Motifs

[0172] The following motifs have been identified as conferring binding activity to IR and/or IGF-1R:

[0173] 1. X₁X₂X₃X₄X₅ (Formula 1; Group 1; the A6 motif) wherein X₁, X₂, X₄ and X₅ are aromatic amino acids, preferably, phenylalanine or tyrosine. Most preferably, X₁ and X₅ are phenylalanine and X₂ is tyrosine. X₃ may be any small polar amino acid, but is preferably selected from aspartic acid, glutamic acid, glycine, or serine, and is most preferably aspartic acid or glutamic acid. X₄ is most preferably tryptophan, tyrosine, or phenylalanine and most preferably tryptophan. Particularly preferred embodiments of the A6 motif are FYDWF (SEQ ID NO:1554) and FYEWF (SEQ ID NO:1555). The A6 motif possesses agonist activity at IGF-1R, but agonist or antagonist activity at IR depending on the identity of amino acids flanking A6. See FIG. 5A.

[0174] Amino acid sequences that comprise the A6 motif and possess agonist activity at IR, include but are not limited to, D117/H2C: FHENFYDWFVRQVSKK (SEQ ID NO:1556); D117/H2 minus terminal lysines: FHENFYDWFVRQVS (SEQ ID NO:1557); RP9: GSLDESFYDWFERQLGKK (SEQ ID NO:1558); RP9 minus terminal lysines: GSLDESFYDWFERQLG (SEQ ID NO:1559); and S175: GRVDWLQRNANFYDWFVAELG (SEQ ID NO:1560). Preferred RP9 sequences include GLADEDFYEWFERQLR (SEQ ID NO:1561), GLADELFYEWFDRQLS (SEQ ID NO:1562), GQLDEDFYEWFDRQLS (SEQ ID NO:1563), GQLDEDFYAWFDRQLS (SEQ ID NO:1564), GFMDESFYEWFERQLR (SEQ ID NO:1565), GFWDESFYAWFERQLR (SEQ ID NO:1566), GFMDESFYAWFERQLR (SEQ ID NO:1567), and GFWDESFYEWFERQLR (SEQ ID NO:1568). Non-limiting examples of Group 1 (Formula 1; A6) amino acid sequences are shown in FIGS. 1A-1O.

[0175] 2. X₆X₇X₈X₉X₁₀X₁₁X₁₂X₁₃ (Formula 2, Group 3; the B6 motif) wherein X₆ and X₇ are aromatic amino acids, preferably, phenylalanine or tyrosine. Most preferably, X₆ is phenylalanine and X₇ is tyrosine. X₈, X₉, X₁₁, and X₁₂ may be any amino acid. X₁₀ and X₁₃ are hydrophobic amino acids, preferably leucine, isoleucine, phenylalanine, tryptophan or methionine, but more preferably leucine or isoleucine. X₁₀ is most preferably isoleucine for binding to IR and leucine for binding to IGF-1R. X₁₃ is most preferably leucine. Amino acid sequences of Formula 2 may function as an antagonist at the IGF-1R, or as an agonist at the IR. Preferred consensus sequences of the Formula 2 motif are FYX₈X₉LX₁₁X₁₂L (SEQ ID NO:1569), FYX₈X₉IX₁₁X₁₂L (SEQ ID NO:1570), FYX₈AIX₁₁X₁₂L (SEQ ID NO:1571), and FYX₈YFX₁₁X₁₂L (SEQ ID NO:1572).

[0176] Another Formula 2 motif for use with this invention comprises FYX₈Y FX₁₁X₁₂L (SEQ ID NO:1573) and is shown as Formula 2A (“NNRP”) below: X₁₁₅X₁₁₆X₁₁₇X₁₁₈FYX₈YFX₁₁X₁₂LX₁₁₉X₁₂₀X₁₂₁X₁₂₂ (SEQ ID NO:1574) wherein X₁₁₅-X₁₁₈ and X₁₁₈-X₁₂₂ may be any amino acid which allows for binding to IR or IGF-1R. X₁₁₅ is preferably selected from the group consisting of tryptophan, glycine, aspartic acid, glutamic acid, and arginine. Aspartic acid, glutamic acid, glycine, and arginine are more preferred. Tryptophan is most preferred. The preference for tryptophan is based on its presence in clones at a frequency three to five fold higher than that expected over chance for a random substitution, whereas aspartic acid, glutamic acid and arginine are present about two fold over the frequency expected for random substitution.

[0177] X₁₁₆ preferably is an amino acid selected from the group consisting of aspartic acid, histidine, glycine, and asparagine. X₁₁₇ and X₁₁₈ are preferably glycine, aspartic acid, glutamic acid, asparagine, or alanine. More preferably X₁₁₇ is glycine, aspartic acid, glutamic acid and asparagine whereas X₁₁₈ is more preferably glycine, aspartic acid, glutamic acid or alanine. X₈ when present in the Formula 2A motif is preferably arginine, glycine, glutamic acid, or serine. X₁₁ when present in the Formula 2A motif is preferably glutamic acid, asparagine, glutamine, or tryptophan, but most preferably glutamic acid. X₁₂ when present in the Formula 2A motif is preferably aspartic acid, glutamic acid, glycine, lysine or glutamine, but most preferably aspartic acid. X₁₁₉ is preferably glutamic acid, glycine, glutamine, aspartic acid or alanine, but most preferably glutamic acid. X₁₂₀ is preferably glutamic acid, aspartic acid, glycine or glutamine, but most preferably glutamic acid. X₁₂₁ is preferably tryptophan, tyrosine, glutamic acid, phenylalanine, histidine, or aspartic acid, but most preferably tryptophan or tyrosine. X₁₂₂ is preferably glutamic acid, aspartic acid or glycine; but most preferably glutamic acid. Preferred amino acid residue are identified based on their frequency in clones over two fold over that expected for a random event, whereas the more preferred sequences occur about 3-5 times as frequently as expected.

[0178] In certain cases, Formula 1 and Formula 2 amino acid sequences may also include two cysteine residues, which may be positioned either outside or inside the motif sequence (e.g., X₁ X₂ X₃X₄ X₅ and X₆X₇X₈X₉X₁₀X₁₁X₁₂X₁₃), as described herein. The spacing between the cysteine residues preferably may vary from 3 amino acids, e.g., RP62 (CDFYCALSRLSGQPRDRMPNYPGTS; SEQ ID NO:XX) up to 19 amino acids, e.g., RP35 (DRDFCRFYERLTALVGGQVDGGWPC; SEQ ID NO:XX). Formula 1 and Formula 2 peptides may exhibit varying size and cysteine positioning. For example, Formula 2 peptide RP6 (TFYSCLASLLTGTPQPNRGPWERCR; SEQ ID NO:XX) and derivatives, RP30-IGF, RP33-IGF, include two cysteine residues separated by 18 amino acids. In contrast, Formula 1 peptide G33 (GIISQSCPESFYDWFAGQVSDPWWCW; SEQ ID NO:XX) includes two cysteines separated by 17 amino acid residues. In certain Formula and Formula 2 peptides, the position and spacing of the cysteine residues was found to be highly preferred in these peptides as determined by calculations of amino acid preferences from peptides obtained by biopanning of RP6 and G33 secondary libraries. Without wishing to be bound by theory, it is possible that the cysteine pairs observed in Formula 1 and Formula 2 amino acid sequences form cysteine loop structures.

[0179] 3. X₁₄X₁₅X₁₆X₁₇X₁₈X₁₉X₂₀X₂₁ (Formula 3, reverse B6, revB6), wherein X₁₄ and X₁₇ are hydrophobic amino acids; X₁₄, X₁₇ are preferably leucine, isoleucine, and valine, but most preferably leucine; X₁₅, X₁₆, X₁₈ and X₁₉ may be any amino acid; X₂₀ is an aromatic amino acid, preferably tyrosine or histidine, but most preferably tyrosine; and X₂₁ is an aromatic amino acid, but preferably phenylalanine or tyrosine, and most preferably phenylalanine. For use as an IGF-1R binding ligand, an aromatic amino acid is strongly preferred at X₁₈.

[0180] 4. X₂₂X₂₃X₂₄X₂₅X₂₆X₂₇X₂₈X₂₉X₃₀X₃₁X₃₂X₃₃X₃₄X₃₅X₃₆X₃₇X₃₈X₃₉X₄₀ X₄₁ (Formula 4; Group 7; the F8 motif) wherein X₂₂, X₂₅, X₂₆, X₂₈, X₂₉, X₃₀, X₃₃, X₃₄, X₃₅, X₃₆, X₃₇, X₃₈, X₄₀, and X₄₁ are any amino acid. X₃₅ and X₃₇ may be any amino acid when the F8 motif is used as an IR binding ligand or as a component of an IR binding ligand, however for use as an IGF-1R binding ligand, glycine is strongly preferred at X₃₇ and a hydrophobic amino acid, particularly, leucine, is preferred at X₃₅. X₂₃ is a hydrophobic amino acid. Methionine, valine, leucine or isoleucine are preferred amino acids for X₂₃, however, leucine which is most preferred for preparation of an IGF-1R binding ligand is especially preferred for preparation of an IR binding ligand. At least one cysteine is located at X₂₄ through X₂₇, and one at X₃₉ or X₄₀. Together the cysteines are capable of forming a cysteine cross-link to create a looped amino acid sequence. In addition, although a spacing of 14 amino acids in between the two cysteine residues is preferred, other spacings may also be used provided binding to IGF-1R or IR is maintained. Accordingly, other amino acids may be substituted for the cysteines at positions X₂₄ and X₃₉ if the cysteines occupy other positions.

[0181] In one embodiment, for example, the cysteine at position X₂₄ may occur at position X₂₇ which will produce a smaller loop provided that the cysteine is maintained at position X₃₉. These smaller looped peptides are described herein as Formula 5, infra. X₂₇ is any polar amino acid, but is preferably selected from glutamic acid, glutamine, aspartic acid, asparagine, or as discussed above cysteine. The presence of glutamic acid at position X₂₇ decreases binding to IR but has less of an effect on binding to IGF-1R. X₃₁ is any aromatic amino acid and X₃₂ is any small amino acid. For binding to IGF-1R, glycine or serine is preferred at position X₃₁, however, tryptophan is highly preferred for binding to IR. At position X₃₂, glycine is preferred for both IGF-1R and IR binding. X₃₆ is an aromatic amino acid. A preferred consensus sequence for F8 is X₂₂LCX₂₅X₂₆EX₂₈X₂₉X₃₀WGX₃₃X₃₄X₃₅ X₃₆X₃₇X₃₈CX₄₀X₄₁ (SEQ ID NO:1575) whereas the amino acids are defined above. A more preferred F8 sequence is HLCVLEELFWGASLFGYCSG (“F8”; SEQ ID NO:1576). Amino acid sequences comprising the F8 sequence motif preferably bind to IR over IGF-1R. FIGS. 2A-2E list non-limiting examples of Formula 4 amino acid sequences.

[0182] 5. X₄₂X₄₃X₄₄X₄₅X₄₆X₄₇X₄₈X₄₉X₅₀X₅₁X₅₂X₅₃X₅₄X₅₅X₅₆X₅₇X₅₈X₅₉X₆₀X₆₁ (Formula 5; mini F8 motif) wherein X₄₂, X₄₃, X₄₄, X₄₅, X₅₃, X₅₅, X₅₆, X₅₈, X₆₀, and X₆₁ are any amino acid. X₄₃, X₄₆, X₄₉, X₅₀, and X₅₄ are hydrophobic amino acids, however, X₄₃ and X₄₆ are preferably leucine, whereas X₅₀ is preferably phenylalanine or tyrosine but most preferably phenylalanine. X₄₇ and X₅₉ are cysteines. X₄₈ is preferably a polar amino acid, i.e., aspartic acid or glutamic acid, but most preferably glutamic acid. Use of the small amino acid at position 54 may confer IGF-1R specificity. X₅₁, X₅₂, and X₅₇ are small amino acids, preferably glycine. A preferred consensus sequence for mini F8 is X₄₂X₄₃X₄₄X₄₅LCEX₄₉FGGX₅₃X₅₄X₅₅X₅₆G X₅₈CX₆₀X₆₁ (SEQ ID NO:1577). Amino acid sequences comprising the sequence of Formula 5 preferably bind to IGF-1R or IR.

[0183] 6. X₆₂X₆₃X₆₄X₆₅X₆₆X₆₇X₆₈X₆₉X₇₀X₇₁X₇₂X₇₃X₇₄X₇₅X₇₆X₇₇X₇₈X₇₉X₈₀ X₈₁ (Formula 6; Group 2; the D8 motif) wherein X₆₂, X₆₅, X₆₈, X₆₉, X₇₁, X₇₃, X₇₆, X₇₇, X₇₈, X₈₀, and X₈₁ may be any amino acid. X₆₆ may also be any amino acid, however, there is a strong preference for glutamic acid. Substitution of X₆₆ with glutamine or valine may result in attenuation of binding. X₆₃, X₇₀, and X₇₄ are hydrophobic amino acids. X₆₃ is preferably leucine, isoleucine, methionine, or valine, but most preferably leucine. X₇₀ and X₇₄ are preferably valine, isoleucine, leucine, or methionine. X₇₄ is most preferably valine. X₆₄ is a polar amino acid, more preferably aspartic acid or glutamic acid, and most preferably glutamic acid. X₆₇ and X₇₅ are aromatic amino acids. Whereas tryptophan is highly preferred at X₆₇, X₇₅ is preferably tyrosine or tryptophan but most preferably tyrosine. X₇₂ and X₇₉ are cysteines that again are believed to form a loop which position amino acid may be altered by shifting the cysteines in the amino acid sequence.

[0184] D8 is most useful as an amino acid sequence having a preference for binding to IR as only a few D8 sequences capable of binding to IGF-1R over background have been detected. A preferred sequence for binding to IR is X₆₂LX₆₄X₆₅X₆₆WX₆₈X₆₉X₇₀X₇₁CX₇₃X₇₄X₇₅X₇₆X₇₇X₇₈CX₈₀X₈₁ (SEQ ID NO:1578). Examples of specific peptide sequences comprising this motif include D8 KWLDQEWAWVQCEVYGRGCPSKK (SEQ ID NO:1579); and D8 minus terminal lysines: KWLDQEWAWVQCEVYGRGCPS (SEQ ID NO:1580). Preferred D8 monomer sequences include SLEEEWAQIQCEIYGRGCRY (SEQ ID NO:1581) and SLEEEWAQIQCEIWGRGCRY (SEQ ID NO:1582). Preferred D8 dimer sequences include SLEEEWAQIECEVYGRGCPS (SEQ ID NO:1583), and SLEEEWAQIECEVWGRGCPS (SEQ ID NO:1584). Non-limiting examples of Group 2 (Formula 6; D8) amino acid sequences are shown in FIGS. 3A-3E.

[0185] 7. HX₈₂X₈₃X₈₄X₈₅X₈₆X₈₇X₈₈X₈₉X₉₀X₉₁X₉₂ (Formula 7) wherein X₈₂ is proline or alanine but most preferably proline; X₈₃ is a small amino acid more preferably proline, serine or threonine and most preferably proline; X₈₄ is selected from leucine, serine or threonine but most preferably leucine; X₈₅ is a polar amino acid preferably glutamic acid, serine, lysine or asparagine but more preferably serine; X₈₆ may be any amino acid but is preferably a polar amino acid such as histidine, glutamic acid, aspartic acid, or glutamine; X₈₇ is an aliphatic amino acid preferably leucine, methionine or isoleucine and most preferably leucine; amino acid X₈₈, X₈₉ and X₉₀ may be any amino acids; X₉₁ is an aliphatic amino acid with a strong preference for leucine as is X₉₂. Phenylalanine may also be used at position 92. A preferred consensus sequence of Formula 7 is HPPLSX₈₆LX₈₈X₈₉X₉₀LL (SEQ ID NO:1585). The Formula 7 motif binds to IR with little or no binding to IGF-1R.

[0186] 8. Another sequence is X₁₀₄X₁₀₅X₁₀₆X₁₀₇X₁₀₈X₁₀₉X₁₁₀X₁₁₁X₁₁₂X₁₁₃ X₁₁₄ (Formula 8) which comprises eleven amino acids wherein at least one, and preferably two of the amino acids of X₁₀₆ through X₁₁₁ are tryptophan. In addition, it is also preferred that when two tryptophan amino acids are present in the sequence they are separated by three amino acids, which are preferably, in sequential order proline, threonine and tyrosine with proline being adjacent to the tryptophan at the amino terminal end. Accordingly, the most preferred sequence for X₁₀₇X₁₀₈X₁₀₉X₁₁₀X₁₁₁ is WPTYW (SEQ ID NO:1586). At least one of the three amino acids on the amino terminal (X₁₀₄, X₁₀₅, X₁₀₆) and at least one of the amino acids carboxy terminal (X₁₁₂, X₁₁₃, X₁₁₄) ends immediately flanking X₁₀₇-X₁₁₁ are preferably a cysteine residue, most preferably at X₁₀₅ and X₁₁₃ respectively. Without being bound by theory, the cysteines are preferably spaced so as to allow for the formation of a loop structure. X₁₀₄ and X₁₁₄ are both small amino acids such as, for example, alanine and glycine. Most preferably, X₁₀₄ is alanine and X₁₁₄ is glycine. X₁₀₅ may be any amino acid but is preferably valine. X₁₁₂ is preferably asparagine. Thus, the most preferred sequence is ACVWPTYWNCG (SEQ ID NO:1587).

[0187] 9. An amino acid sequence comprising JBA5: DYKDLCQSWGVRIGWLAGLCPKK (SEQ ID NO:1541); or JBA5 without terminal lysines: LCQSWGVRIGWLAGLCP (SEQ ID NO:1542) (Formula 9). The Formula 9 motif is another motif believed to form a cysteine loop that possesses agonist activity at both IR and IGF-1R. Although IR binding is not detectable by ELISA, binding of Formula 9 to IR is competed by insulin and is agonistic.

[0188] 10. W X₁₂₃ G Y X₁₂₄ W X₁₂₅ X₁₂₆ (SEQ ID NO:1543) (Formula 10; Group 6) wherein X₁₂₃ is selected from proline, glycine, serine, arginine, alanine or leucine, but more preferably proline; X₁₂₄ is any amino acid, but preferably a charged or aromatic amino acid; X₁₂₅ is a hydrophobic amino acid preferably leucine or phenylalanine, and most preferably leucine. X₁₂₆ is any amino acid, but preferably a small amino acid. In one embodiment of the present invention, the Formula 10, Group 6 motif is WPGY (SEQ ID NO:1588). Examples of specific peptide sequences comprising this motif include E8: KVRGFQGGTVWPGYEWLRNAAKK (SEQ ID NO:1589); and E8 minus terminal lysines: KVRGFQGGTVWPGYEWLRNAA (SEQ ID NO:1590). Preferred Group 6 sequences include WAGYEWF (SEQ ID NO:1591), WEGYEWL (SEQ ID NO:1592), WAGYEWL (SEQ ID NO:1593), WEGYEWF (SEQ ID NO:1594), and DSDWAGYEWFEEQLD (SEQ ID NO:1595). Non-limiting examples of Group 6 amino acid sequences are shown in FIGS. 4A-4B.

[0189] The IR and IGF-1R binding activities of representative Group 1 (Formula 1; A6); Group 2 (Formula 6; D8); and Group 6 (Formula 10); and Group 7 (Formula 4; F8) amino acid sequences are summarized in FIGS. 8 and 9A-9B. Group 1 (Formula 1; A6) amino acid sequences contain the consensus sequence FyxWF (SEQ ID NO:1596), which is typically agonistic in cell-based assays. Group 2 (Formula 6; D8) amino acid sequences are composed of two internal sequences having a consensus sequence VYGR (SEQ ID NO:1597) and two cysteine residues each. Thus, Group 2 peptides are capable of forming a cyclic peptide bridged with a disulfide bond. Neither of these consensus sequences have any significant linear sequence similarities greater than 2 or 3 amino acids with mature insulin. Group 7 (Formula 4; F8) amino acid sequences are composed of two internal exemplary sequences which do not have any significant sequence homology, but have two cysteine residues 13-14 residues apart, thus being capable of forming a cyclic peptide with a long loop anchored by a disulfide bridge.

[0190] B. Amino and Carboxyl Terminal Extensions Modulate Activity of Motifs

[0191] In addition to the motifs stated above, the invention also provides preferred sequences at the amino terminal or carboxyl terminal ends which are capable of enhancing binding of the motifs to either IR, IGF-1R, or both. In addition, the use of the extensions described below does not preclude the possible use of the motifs with other substitutions, additions or deletions that allow for binding to IR, IGF-1R, or both.

[0192] 1. Formula 1

[0193] Any amino acid sequence may be used for extensions of the amino terminal end of A6, although certain amino acids in amino terminal extensions may be identified which modulate activity. Preferred carboxy terminal extensions for A6 are A6-X₉₃X₉₄X₉₅X₉₆X₉₇ wherein X₉₃ may be any amino acid, but is preferably selected from the group consisting of alanine, valine, aspartic acid, glutamic acid, and arginine, and X₉₄ and X₉₇ are any amino acid; X₉₅ is preferably glutamine, glutamic acid, alanine or lysine but most preferably glutamine. The presence of glutamic acid at X₉₅ however may confer some IR selectivity. Further, the failure to obtain sequences having an asparagine or aspartic acid at position X₉₅ may indicate that these amino acids should be avoided to maintain or enhance sufficient binding to IR and IGF-1R. X₉₆ is preferably a hydrophobic or aliphatic amino acid, more preferably leucine, isoleucine, valine, or tryptophan but most preferably leucine. Hydrophobic residues, especially tryptophan at X₉₆ may be used to enhance IR selectivity.

[0194] 2. Formula 2

[0195] B6 with amino terminal and carboxy terminal extensions may be represented as X₉₈X₉₉-B6-X₁₀₀. X₉₈ is optionally aspartic acid and X₉₉ is independently an amino acid selected from the group consisting of glycine, glutamine, and proline. The presence of an aspartic acid at X₉₈ and a proline at X₉₉ is associated with an enhancement of binding for both IR and IGF-1R. A hydrophobic amino acid is preferred for the amino acid at X₁₀₀, an aliphatic amino acid is more preferred. Most preferably leucine, for IR and valine for IGF-1R. Negatively charged amino acids are preferred at both the amino and carboxy terminals of Formula 2A.

[0196] 3. Formula 3

[0197] An amino terminal extension of Formula 3 defined as X₁₀₁X₁₀₂X₁₀₃-revB6 wherein X₁₀₃ is a hydrophobic amino acid, preferably leucine, isoleucine or valine, and X₁₀₂ and X₁₀₁ are preferably polar amino acids, more preferably aspartic acid or glutamic acid may be useful for enhancing binding to IR and IGF-1R. No preference is apparent for the amino acids at the carboxy terminal end of Formula 3.

[0198] 4. Formula 10

[0199] In one preferred embodiment, Formula 10 sequences WX₁₂₃GYX₁₂₄WX₁₂₅X₁₂₆ (SEQ ID NO:1543) can include an amino terminal extension comprising the sequence DSD and/or a carboxy terminal extension comprising the sequence EQLD (SEQ ID NO:1598).

[0200] C. IR Binding Preferences

[0201] As indicated above, the amino acid sequences containing the motifs of this invention may be constructed to have enhanced selectivity for either IR or IGF-1R by choosing appropriate amino acids at specific positions of the motifs or the regions flanking them. By providing amino acid preferences for IR or IGF-1R, this invention provides the means for constructing amino acid sequences with minimized activity at the non-cognate receptor. For example, the amino acid sequences disclosed herein with high affinity and activity for IR and low affinity and activity for IGF-1R are desirable as IR agonist as their propensity to promote undesirable cell proliferation, an activity of IGF-1 agonists, is reduced. Ratios of IR binding affinity to IGF-1R binding affinity for specific sequences are provided in FIGS. 1A-1O; 2A-2E; 3A-3E; 4A-4I; 44A-44B. As an insulin therapeutic, the IR/IGF-1R binding affinity ratio is preferably greater than 100. Conversely, for use as an IGF-1R therapeutic, the IR/IGF-1R ratio should be less than 0.01. Examples of peptides that selectively bind to IGF-1R are shown below.

TABLE 1
IGF-IR-SELECTIVE SEQUENCES

| | |
|---|---|
| Ratios over | |
| Background | Comparisons |

| | | | | | | | |
|---|---|---|---|---|---|---|---|
| | SEQ ID | | | | | | |
| Clone | NO: | Sequence | E-Tag | IGF-IR | IR | IGF-1R/IR | IR/IGF-1R |

FORMULA 1 (Group 1; A6-like):

| | | | | | | | |
|---|---|---|---|---|---|---|---|
| A6L-0-E6-IR | 1599 | YRGMLVLGRSSDGAGKVAFERPARIGQTVFAVNFYDWFV | 31.0 | 31.0 | 1.8 | 17.0 | 0.1 |
| H2CA-4-G9-IGFR | 1600 | GIISQSCPESFYDWPAGQVSDPWWCW | 8.6 | 9.5 | 0.6 | 16.0 | 0.1 |
| H2CA-4-H6-IGFR | 1601 | VGRASGFPENFYDWFGRQLSLQSGEQ | 4.9 | 10.5 | 0.7 | 14.6 | 0.1 |
| A6L-0-E4-IR | 1602 | YRGMLVLGRISDGAG#VASEPPARIGRKVFAVNFYDWFV | 26.0 | 16.0 | 1.3 | 13.0 | 0.1 |
| A6L-0-H3-IR | 1603 | YRGMLVLGRISGGAGKAASERPARIGQKVSAVNFYDWFV | 27.0 | 26.0 | 2.0 | 13.0 | 0.1 |
| H2CA-4-F5-IGFR | 1604 | VGYQGQGDENFYDWFIRQVSGRLGVQ | 5.5 | 9.7 | 0.8 | 12.3 | 0.1 |
| H2CA-4-H8-IGFR | 1605 | SACQPDCHENFYDWFARQVSGGAAYG | 5.6 | 9.2 | 1.0 | 9.4 | 0.1 |
| H2CA-4-F11-IGFR | 1606 | SAAQLFFQESFYDWFLRQVAESSQPN | 3.5 | 6.8 | 1.0 | 6.7 | 0.1 |
| H2CA-4-F6-IGFR | 1607 | AVRAIRFDEAFYDWFVRQISDGQGNK | 3.9 | 7.3 | 1.1 | 6.4 | 0.2 |
| H2CA-4-P10-IGFR | 1608 | VNQSGSIHENFYDWFERQVSHQRGVR | 4.9 | 5.7 | 1.0 | 5.9 | 0.2 |
| H2CA-1-A3-IGFR | 1609 | APDPSDFQEIFYDWFVRQVSRNPGGG | 7.7 | 3.8 | 0.8 | 5.1 | 0.2 |
| H2CA-3-C8-IGFR | 1610 | SSCDGAGHESFYEYNFVRQVSGCRSV | 15.1 | 5.6 | 1.2 | 4.8 | 0.2 |
| H2CA-2-B9-IGFR | 1611 | RAGSSDFHEDFYEWFVRQVSLSLKGK | 9.3 | 7.0 | 1.7 | 4.2 | 0.2 |
| H2CA-4-H4-IGFR | 1612 | QAVQPGFHEEFYDYNFVRQVSTGVGGG | 3.9 | 4.1 | 1.0 | 4.2 | 0.2 |
| E4Dα-4-H2-IR | 1613 | GFREGNFYEWFQAQVT | 37.8 | 33.9 | 8.2 | 4.1 | 0.2 |
| H2CA-4-F7-IGFR | 1614 | SSIGGGFHENFYDWFSRQLSQSPPLK | 1.5 | 3.2 | 0.8 | 4.1 | 0.2 |
| H2CA-3-D6-IGFR | 1615 | QSPVGSSHEDFYDWFPRQVAQSGAHQ | 8.3 | 9.0 | 2.2 | 4.0 | 0.3 |
| H2CA-3-D8-IGFR | 1616 | NYRRQVPNGNFYDWFDRQVFSLVTPG | 10.9 | 7.2 | 1.8 | 4.0 | 0.3 |
| H2CA-4-G11-IGFR | 1617 | TLDGGSFEEQFYDWFVRQLSYRTNPD | 10.8 | 9.5 | 2.5 | 3.9 | 0.3 |
| H2CA-4-P1-IGFR | 1618 | FYVQQYWGHENFYDWFDRQVSQSGGAG | 5.8 | 3.5 | 0.9 | 3.8 | 0.3 |
| H2CA-3-D7-IGFR | 1619 | LRRQAPVEENFYDWFVRQVSGDRVGG | 13.3 | 3.0 | 0.8 | 3.7 | 0.3 |
| H2CA-1-A7-IGFR | 1620 | RCGRELYHSTFYDWFDRQVAGRTCPS | 8.0 | 2.2 | 0.6 | 3.7 | 0.3 |
| H2CA-2-B4-IGFR | 1621 | CCLLCRFQQNFYDWFVCQGISRLRPL | 3.5 | 4.1 | 1.1 | 3.6 | 0.3 |
| H2CA-2-B3-IGFR | 1622 | PPLASDLDVQFYGWFVQQVSPPGRGG | 7.7 | 3.8 | 1.0 | 3.6 | 0.3 |
| H2CA-2-B2-IGFR | 1623 | GAPVDQLHEDFYDWFVRQVSQAATG | 4.1 | 3.4 | 1.0 | 3.5 | 0.3 |
| E4Dα-2-D11-IGFR | 1624 | GFREGSFYDWFQAQVT | 40.2 | 11.1 | 3.3 | 3.4 | 0.3 |
| 20E2Bβ-4-G6-IR | 1625 | SQAGSAFYAWFDQVLRTVHSA | 22.4 | 6.2 | 1.9 | 3.3 | 0.3 |
| H2CA-4-H9-IGFR | 1626 | RGAVAGPHDQFYDWFDRQVSRVHKPG | 8.7 | 5.6 | 1.9 | 3.0 | 0.3 |
| H2CA-2-B11-IGFR | 1627 | AICDAGFHEHFYDWFALQVSDCGRQS | 11.9 | 4.6 | 1.6 | 3.0 | 0.3 |
| H2CA-3-E8-IGFR | 1628 | LGYQEPFQQNFYDWFVRQVSGAENAG | 13.2 | 6.3 | 2.2 | 2.9 | 0.3 |
| A6S-2-D11-IR | 1629 | EAASLGSQDRNFYDWFVRQVV | 48.4 | 37.4 | 13.5 | 2.8 | 0.4 |
| A6S-2-D1-IR | 1630 | VERSASSQDGNFYDWFVVQIR | 37.8 | 30.6 | 12.0 | 2.6 | 0.4 |
| A6S-3-E2-IR | 1631 | TSEVQRRSQDNGYDWFVAQVA | 33.1 | 24.7 | 9.8 | 2.5 | 0.4 |
| H2CA-3-E11-IGFR | 1632 | HLADGQFHEKFYDWFERQISSRCNDC | 4.7 | 2.2 | 1.0 | 2.2 | 0.5 |
| 0 | | | | | | | |
| H2CA-3-C11-IGFR | 1633 | FRTLAAQHDSFYDWFDRQVSGAAGER | 9.3 | 3.3 | 1.6 | 2.1 | 0.5 |
| A6-PD1-IGFR | 1634 | SFHEDFYDWFDRQVSGSLKK | | | | | |
| H2C-PD1-IGFR(RP9) | 1558 | GSLDESFYDWFERQLGKK | | | | | |

FORMULA 2 (Group 2; B6-like)

| | | | | | | | |
|---|---|---|---|---|---|---|---|
| 20C-3-G3-IGFR | 1635 | TFYSCLASLLTGTPQPNRGPWERCE | 33.1 | 32.3 | 1.2 | 27.0 | <0.1 |
| 20C-4-C7-IGFR | 1636 | FFYDCLAALLQGVARYHDLCAVEIT | 35.3 | 28.0 | 1.3 | 21.8 | <0.1 |
| B6Hα-1-B5-IR | 1637 | CCTTEMVVMDARDDPFYHKLSELVTGG | 41.5 | 20.5 | 1.0 | 20.5 | 0.0 |
| R20β-4-A6-IR | 1638 | RGQSDAFYSGLWALIGLSDG | 9.3 | 25.9 | 1.5 | 17.3 | 0.1 |
| 20E2B-1-A6-IGFR | 1639 | GVRAMSFYDALVSVLGLGPSG | 18.6 | 18.1 | 1.1 | 16.8 | 0.1 |
| R20α-4-20A12-IR | 1640 | RLFYCGIQALGANLGYSGCV | 48.6 | 39.9 | 2.4 | 16.6 | 0.1 |
| 20E2Bβ-4-G7-IR | 1641 | LQPCSGFYECIERLIGVKLSG | 19.9 | 25.2 | 1.6 | 15.8 | 0.1 |
| NNRPγ-4-B11-IR | 1642 | LKDGFYDYFWQRLHLGS | 4.1 | 18.7 | 1.2 | 15.5 | 0.1 |
| 20E2B-3-C6-IGFR | 1643 | VEGRGLFYDLLRQLLARRQNG | 17.9 | 16.8 | 1.1 | 14.8 | 0.1 |
| B6Hα-1-A2-IR | 1644 | RGCNDDGGKGWSDDPFYHKLSELICGG | 22.3 | 14.6 | 1.0 | 14.6 | 0.1 |
| 20E2A-4-F11-IGFR | 1645 | QGGSASFYDAIDRLLRMRIGG | 21.3 | 18.8 | 1.3 | 14.6 | 0.1 |
| B6Hα-3-E9-IR | 1646 | RCEEKQAEVGPSSDPFYHKMSELLGCR | 44.6 | 24.2 | 1.7 | 14.2 | 0.1 |
| 20C-3-F6-IGFR | 1647 | DRDFCRFYRLTALVGGQVDGGWPC | 33.5 | 26.1 | 1.9 | 14.1 | 0.1 |
| 20E2B-4-H3-IGFR | 1648 | KLHNLMFYYGLQRLVWGAGLG | 11.2 | 14.8 | 1.1 | 13.9 | 0.1 |
| 20E2B-3-C2-IGFR | 1649 | GNGDGMFYQLLSLLVGRDMHV | 13.1 | 8.9 | 0.6 | 13.8 | 0.1 |
| 20C-3-A1-IGFR | 1650 | SSYGCDFYLMLFSLGLVASQELEC | 26.5 | 20.8 | 1.5 | 13.7 | 0.1 |
| 20E2B-3-E3-IGFR | 1651 | PDLHKGFYAQLAQLIRGQLLS | 22.4 | 16.3 | 1.3 | 13.1 | 0.1 |
| R20α-3-20E2-IR | 1652 | FYDAIDQLVRGSARAGGTRD | 46.3 | 39.9 | 3.1 | 12.9 | 0.1 |
| 20E2B-4-H12-IGFR | 1653 | YSCGDGFYSLLSDLLGGQFRC | 6.5 | 9.7 | 0.8 | 12.8 | 0.1 |
| B6Hα-3-F11-IR | 1654 | RGMKEEVLVGGSTDPFYHKLSELLQGS | 49.5 | 18.7 | 1.6 | 11.7 | 0.1 |
| 20E2B-3-D2-IGFR | 1655 | IQQELTFYDLLHRLVRSELGS | 20.7 | 12.4 | 1.1 | 11.7 | 0.1 |
| 20E2B-3-D8-IGFR | 1656 | GGTEVDFYRALERLVRGQLGL | 20.4 | 17.7 | 1.6 | 11.3 | 0.1 |
| 20E2B-3-E8-IGFR | 1657 | LRIANLFYQRLWDLAFGGGG | 15.7 | 16.7 | 1.5 | 11.1 | 0.1 |
| B6Hα-2-C4-IR | 1658 | RCGRW*AEMGAGDDPFYHKLSELVCG | 20.7 | 9.9 | 0.9 | 11.0 | 0.1 |
| R2Dα-4-20C11-IR | 1659 | DRAFYNGLRDLVGAVYGAWD | 43.7 | 30.8 | 3.0 | 10.3 | 0.1 |
| 20E2B-4-F8-IGFR | 1660 | PVGVQGFYEGLSRLVLGRGGW | 12.3 | 7.3 | 0.8 | 9.7 | 0.1 |
| 20E2B-1-A11-IGFR | 1661 | RFSTDGFYQYLLALVGGGPVG | 15.0 | 9.5 | 1.0 | 9.7 | 0.1 |
| 20E2B-3-D4-IGFR | 1662 | NSRDGGFYLQLERLLGFPVTG | 8.1 | 7.9 | 0.8 | 9.6 | 0.1 |
| 20E2B-2-B11-IGFR | 1663 | VVTPVNGRRALEALVRG.RLG | 13.9 | 10.6 | 1.1 | 9.4 | 0.1 |
| 20E2B-3-C8-IGFR | 1664 | QPAPDGFYSALMKLIGRGGVS | 18.5 | 15.6 | 1.8 | 8.9 | 0.1 |
| 20E2B-2-B2-IGFR | 1665 | PGTDLGFYQALRCVVIQGACD | 11.7 | 4.9 | 0.6 | 8.1 | 0.1 |
| 20E2B-4-F10-IGFR | 1666 | AQPCGGFYGLLEQLVGRSVCD | 19.0 | 17.3 | 2.2 | 7.8 | 0.1 |
| 20E2B-4-F9-IGFR | 1667 | QPDHSYFYSLLQELVGSEERL | 11.9 | 14.7 | 1.9 | 7.7 | 0.1 |
| 20C-30A4-IGFR | 1668 | QFYGCLLDLSLGVPSFGWRRRCITA | 17.7 | 8.8 | 1.2 | 7.6 | 0.1 |
| 20E2B-3-D11-IGFR | 1669 | LGVTDGFYAALGYLIHGVGQF | 14.3 | 12.2 | 1.6 | 7.6 | 0.1 |
| 20E2B-3-C11-IGFR | 1670 | CMM.DGFYAGLGCLLTAGEGR | 15.3 | 15.4 | 2.1 | 7.5 | 0.1 |
| 20E2B-2-B3-IGFR | 1671 | ICTGQGFYQVLCGLLRGTSAR | 9.1 | 5.3 | 0.7 | 7.4 | 0.1 |
| 20E2B-3-D12-IGFR | 1672 | QGNVLDFYGWIGRLLAKQGSD | 10.3 | 6.2 | 0.9 | 7.3 | 0.1 |
| 20E2B-3-E21-IGFR | 1673 | VATSQGFYSGLSELLQGGGNV | 13.9 | 6.0 | 0.8 | 7.3 | 0.1 |
| 20E2B-2-B8-IGFR | 1674 | IWATGDFYRLLSQLVMGRVFT | 17.4 | 5.7 | 0.8 | 7.2 | 0.1 |
| NNRPγ-4-A9-IR | 1675 | EGSGFYGYFFSLLGLQG | 3.0 | 10.0 | 1.4 | 7.1 | 0.1 |
| 20E2B-4-G11-IGFR | 1676 | RQGTGSFYLMLEQLLVGARGP | 8.9 | 4.5 | 0.6 | 7.0 | 0.1 |
| 20E2B-3-D6-IGFR | 1677 | DSVGDNFYQLLESLVGGHGVG | 20.7 | 17.8 | 2.6 | 6.9 | 0.1 |
| B6Hα-2-C7-IR | 1678 | RGIVAMVEATEVGSDHDPFYHKLSELVQGS | 45.1 | 6.7 | 1.0 | 6.7 | 0.1 |
| 20E2B-2-B7-IGFR | 1679 | LSSDGQFYRALNLLLQGSAGR | 18.0 | 6.1 | 0.9 | 6.7 | 0.1 |
| 20E2B-3-C4-IGFR | 1680 | ASSASGFYELLQRLAGLGLEV | 23.4 | 20.4 | 3.3 | 6.2 | 0.2 |
| 20C-3-E4-IGFR | 1681 | FFYRCLSRLLGGQLGSRLGLSCIGD | 37.7 | 7.7 | 1.3 | 6.0 | 0.2 |
| NNRPγ-4-A1-IR | 1682 | IIGGFYSYFNSVLRLGT | 9.7 | 10.9 | 1.8 | 6.0 | 0.2 |
| 20E2B-4-H8-IGFR | 1683 | PAGPCGFYCGLGLLLHGDQSP | 7.2 | 5.3 | 0.9 | 5.9 | 0.2 |
| 20E2B-4-H9-IGFR | 1684 | RCQGRGFYTCIQELIGFGDPD | 4.5 | 5.2 | 0.9 | 5.6 | 0.2 |
| B6Hα-2-C10-IR | 1685 | SGAKVIVVTGDSGDPFYHKLSELLQGS | 46.9 | 5.8 | 1.1 | 5.3 | 0.2 |
| 20E2A-3-C7-IGFR | 1686 | VGTVAGFYDAIAQLVARASRV | 17.6 | 5.4 | 1.1 | 5.1 | 0.2 |
| 20E2B-I-A8-IGFR | 1687 | TLRSPTFYDWLEMVLTHGQGG | 16.1 | 4.4 | 0.9 | 5.0 | 0.2 |
| NNRPγ-4-A7-IR | 1688 | RFDPFYSYFVNLLGASA | 2.5 | 6.3 | 1.3 | 4.9 | 0.2 |
| B6Hα-3-E8-IR | 1689 | RGKTAVVIVGRPADPFYHKLSELLQGG | 47.6 | 5.3 | 1.1 | 4.8 | 0.2 |
| B6Hα-3-F10-IR | 1690 | GCVVEWQKWHGASDPFYHKLSELGGCS | 47.2 | 8.8 | 1.9 | 4.6 | 0.2 |
| B6Hα-2-D6-IR | 1691 | GRTMAVMAAGGPDDPFYHKLSELVQGG | 33.5 | 4.4 | 1.0 | 4.4 | 0.2 |
| B6Hα-3-E7-IR | 1692 | GCAVVEEAERSRGDPFYHKLSELIQGC | 47.0 | 5.6 | 1.3 | 4.3 | 0.2 |
| B6Hα-2-D1-IR | 1693 | GCEVIVEEGDSADPFYHKLSELCQGS | 11.7 | 5.4 | 1.3 | 4.2 | 0.2 |
| 20E2A-3-D10-IGFR | 1694 | MMVVDGFYDALHQLVVAQSLG | 20.6 | 6.9 | 1.8 | 3.9 | 0.3 |
| 20E2A-3-A12-IGFR | 1695 | LSVALSFYDALGQLVAGEGRW | 16.1 | 4.3 | 1.1 | 3.9 | 0.3 |
| B6Hα-4-GB-IR | 1696 | GGTKAVAKVGTRDDPFYHKLSELLQGS | 32.3 | 6.1 | 1.7 | 3.6 | 0.3 |
| B6L-4-D7-IR | 1697 | AETSVQVGWIRLQSVWPGEHWNTVDPFYHKLSELLRGSGA | 14.3 | 4.8 | 1.4 | 3.4 | 0.3 |
| B6Hα-1-A3-IR | 1698 | SRAKVEAEMPDSGDPFYHKLSELLASG | 37.4 | 2.6 | 0.8 | 3.3 | 0.3 |
| B6Hα-3-F7-IR | 1699 | SRVAATKEKRPSDDPFYHKLSELLQGS | 41.5 | 3.1 | 1.0 | 3.1 | 0.3 |
| B6Hα-2-D8-IR | 1700 | SSETAKMVTGTRDDPFYHKLSELVQGS | 19.3 | 3.0 | 1.0 | 3.0 | 0.3 |
| B6Hα-1-B3-IR | 1701 | GCITAENGAGDPFYHKLSELGGCS | 33.1 | 3.2 | 1.1 | 2.9 | 0.3 |
| B6Hα-3-E5-IR | 1702 | RCGDEEGWQENRRDDPFYHKLSELFGGC | 28.8 | 2.9 | 1.0 | 2.9 | 0.3 |
| 20E21-4-G11-IGFR | 1703 | MNVFVSFYDAIDQLVCQRIGC | 20.7 | 3.3 | 1.3 | 2.6 | 0.4 |
| 20E2β-3-C7-IR | 1704 | QSGSGDFYDWLSRLIRGNGDG | 1.5 | 3.1 | 1.5 | 2.0 | 0.5 |
| B6Hα-3-E6-IR | 1705 | CGAKMTGTPNDPFYHKLSELLQRG | 18.2 | 2.3 | 1.2 | 1.9 | 0.5 |
| 20E2A-3-A3-IGFR | 1706 | GHYFGSFYDAIDQLVAGMLPG | 5.2 | 3.0 | 1.5 | 1.9 | 0.5 |
| B6L-4-A7-IR | 1707 | AGTPAQVG*NRLWSVWPGEHWNTVDPFYNKLSELLRESGA | 11.6 | 3.4 | 1.9 | 1.8 | 0.6 |
| B6Hα-3-F1-IR | 1708 | CSMAAVAEAGDDDDPFYHKLSELCQGS | 22.5 | 2.4 | 1.3 | 1.8 | 0.5 |
| B6L-3-G6-IR | 1709 | VDTPAQVGWNRLWSVGPGEHWYTDDPFYH*LSELLRESGA | 7.6 | 2.5 | 1.8 | 1.4 | 0.7 |
| B6L-3-G5-IR | 1710 | AETSAQVGWQRLWSVWPGDHWSTLDPFYHKLSELLRESGA | 11.5 | 2.0 | 1.4 | 1.4 | 0.7 |
| 20B2A-3-A4-IGFR | 1711 | AGSVTSFYDAMEQLVATGTSA | 16.8 | 2.5 | 1.8 | 1.4 | 0.7 |
| B6-PD1-IGFR | 1712 | TDDGFYDALEQLVQGSKK | | | | | |
| 20E2-PD1-IGFR(RP10) | 1713 | GSFYEALQRLVGGEQGKK | | | | | |

FORMULA 10 (Group 6):

| | | | | | | | |
|---|---|---|---|---|---|---|---|
| R20-β-4-E8-IR | 1714 | VRGFQGGTVWPGYEWLRNAA | 41.0 | 34.9 | 3.6 | 9.7 | 0.1 |
| 40F-4-D1-IGFR | 1715 | LSCLAYSRHGIWRPSTDLGLGRSVGEGSVSTRWRGYDWFE | 4.9 | 4.6 | 0.3 | 13.1 | 0.1 |
| 40F-4-B1-IGFR | 1716 | GLDHSDAVGVHLGFAWPAQARGRWEAGGLEDTWAGYDWL | 4.1 | 3.0 | 0.2 | 13.1 | 0.1 |
| 40F-4-D1-IGFR | 1717 | W.GYAWL | 4.9 | 4.5 | 0.4 | 11.7 | 0.1 |

[0202] Besides relative binding at IR or IGF-1R, relative efficacy at the cognate receptor is another important consideration for choosing a potential therapeutic. Thus, a sequence that is efficacious at IR but has little or no significant activity at IGF-1R may also be considered as an important IR therapeutic, irrespective of the relative binding affinities at IR and IGF-1R. For example, A6 selectivity for IR may be enhanced by including glutamic acid in a carboxyl terminal extension at position X₉₅. IR selectivity of the B6 motif may be enhanced by having a tryptophan or phenylalanine at X₁₁. Tryptophan at X₁₃ also favors selectivity of IR. A tryptophan amino acid at X₁₃ rather than leucine at that position also may be used to enhance selectivity for IR. In the reverse B6 motif, a large amino acid at X₁₅ favors IR selectivity. Conversely, small amino acids may confer specificity for IGF-1R. In the F8 motif, an L in position X₂₃ is essentially required for IR binding. In addition, tryptophan at X₃₁ is also highly preferred. At X₃₂, glycine is preferred for IR selectivity.

[0203] D. Multiple Binding Sites on IR and IGF-1R

[0204] The competition data disclosed herein reveals that at least two separate binding sites are present on IR and IGF-1R which recognize the different sequence motifs provided by this invention.

[0205] As shown in FIG. 6, competition data indicate that peptides comprising the A6 motifs compete for binding to the same site on IR (Site 1) whereas the D8 motifs compete for a second site (Site 2). The identification of peptides that bind to separate binding sites on IR and IGF-1R provides for various schemes of binding to IR or IGF-1R to increase or decrease its activity. Examples of such schemes for IR are illustrated in FIG. 7.

[0206] The table below shows sequences based on their groups, which bind to Site 1 or Site 2.

TABLE 2

| | | |
|---|---|---|
| | | SEQ |
| Clone | Sequence | ID NO: |

REPRESENTATIVE SITE 1 PEPTIDES
A6-like (FYxWF) (SEQ ID NO:1596):

| | | |
|---|---|---|
| G3 | KRGGGTFYEWFESALRKHGAGKK | 1718 |
| H2 | VTFTSAVFHENFYDWFVRQVSKK | 1719 |
| H2C | FHENFYDWFVRQVSKK | 1556 |
| A6S-IR3-E12 | GRVDWLQRNANFYDWFVAELG | 1560 |
| A6S-IR4-G1 | NGVERAGTGDNFYDWFVAQLH | 1720 |
| H2C8-R3-812 | QSDSGTVHDRFYGWFRDTWAS | 1721 |
| 20E2A-R3-B11 | GRFYGWFQDAIDQLMPWGFDP | 1722 |
| rB6-F6 | RYGRWGLAQQFYDWFDR | 1723 |
| E4Dα-1-B8-IR~ | GFREGQRWYWFVAQVT | 1724 |
| H2CA-4-F11-IR | TYKARFLHENFYDWFNRQVSQYFGRV | 1725 |
| H2CB-R3-D2 | WTDVDGFHSGFYRWFQNQWER | 1726 |
| H2CB-R3-D12 | VASGHVLHGQFYRWFVDQFAL | 1727 |
| H2CB-R4-H5 | QARVGNVHQQFYEWFREVMQG | 1728 |
| H2C-B-E8* | TGHRLGLDEQFYWWFRDALSG | 1729 |
| H2CB-3-B6-TR~ | VGDFCVSHDCFYGWFLRESMQ | 1730 |
| A65-iR2-C1 | RMYFSTGAPQNFYDWFVQEWD | 1731 |

B6-like (FYxxLxxL) (SEQ ID NO:1732):

| | | |
|---|---|---|
| 20C11 | KDRAFYNGLRDLVGAVYGAWDKK | 1733 |
| 20E2 | DYKDFYDAIDQLVRGSARAGGTRDKK | 1734 |
| B62-R3-C7 | EHWNTVDPFYFTLFEWLRESG | 1735 |
| B62-R3-C10 | EHWNTVDPFYQYFSELLRESG | 1736 |
| 20E2B-3-B3-IR | AGVNAGFYRYFSTLLDWWDQG | 1737 |
| 20E2-B-E3* | TQGWEPFYGWFDDVVAQMFEE | 1738 |
| 20E2A-R4-F9 | PPWGARFYDAIEQLVFDNLCC | 1739 |
| RPNN-4-G6-HOLO* | RWFNFYGYFESLLTHFS | 1740 |
| RPNN-4-F3-HOLO* | HYNAFYEYFQVLLAETW | 1741 |
| 20E2A-R4-E2 | IGRVRSFYDAIDKLFQSDWER | 1742 |
| RPNN-2-C1-IR* | EGWDFYSYFSGLLASVT | 1743 |
| 20E2B-4-F12-IR | SVKEVQFYRYFYDLLQSEESG | 1744 |
| 20E2-B-E12 | GNSGGSFYRYFQLLLDSDGMS | 1745 |
| 20E2A-R3-B6 | RDAGSSFYDAIDQLVCLTYFC | 1746 |

Reverse B6-like (LxxLxxYF) (SEQ ID NO:1747):

| | | |
|---|---|---|
| r86-A12 | LDALDRLMRYFEERPSL | 1748 |
| r86-F9 | PLAELWAYFEHSEQGRSSAH | 1749 |
| rB6-4-E7-IR | LDPLDALLQYFWSVPGH | 1750 |
| rB6-4-F9-IR | RGRLGSLSTQFYNWFAE | 1751 |
| rB6-E6 | ADELEWLLDYFMHQPRP | 1752 |
| rB6-4-F12-IR | DGVLEELFSYFSATVGP | 1753 |

Group 6 (WFxYxWL) (SEQ ID NO:1754):

| | | |
|---|---|---|
| R20β-4-A4-IR | WPGLFFEEALQDWRGSTED | 1755 |

Peptides by design**:

| | | |
|---|---|---|
| H2C-PD1-IR~ | AAVHEQFYDWFADQYKK | 1756 |
| A6S-PD1-IR~ | QAPSNFYDWFVREWDKK | 1757 |
| 20E2-PD1-IR~ | QSFYDYIEELLGGEWKK | 1758 |
| B6C-PD1-IR~ | DPFYQGLWEWLRESGKK | 1759 |

REPRESENTATIVE SITE 2 PEPTIDES (C-C LOOPS)
F8-derived (Long C-C loop):

| | | |
|---|---|---|
| F8 | HLCVLEELFWGASLFGYCSG | 1760 |
| F8-C12 | FQSLLEELVWGAPLFRYGTG | 1761 |
| F8-Des2 | PLCVLEELFWGASLFGYCSG | 1762 |
| F8-F12 | PLCVLEELFWGASLFGQCSG | 1763 |
| F8-B9 | HLCVLEELFWGASLFGQCSG | 1764 |
| F8-B12 | DLRVLCELFGGAYVLGYCSE | 1765 |
| NNKH-2B3 | HRSVLKQLSWGASLFGQWAG | 1766 |
| NNKH-2F9~ | HLSVGEELSWWVALLGQWAR | 1767 |
| NNKH-4H4~ | APVSTEELRWGALLFGQWAG | 1768 |

D8-derived (Small C-C loop):

| | | |
|---|---|---|
| D8 | KWLDQEWAWVQCEVYGRGCPSKK | 1769 |
| D8-G1 | QLEEEWAGVQCEVYGRECPS | 1770 |
| D8-B5~ | ALEEEWAWVQVRSIRSGLPL | 1771 |
| D8-A7 | SLDQEWAWVQCEVYGRGCLS | 1772 |
| D8-F1~ | WLEHEWAQTQCELYGRGCTY | 1773 |

Midi C-C loop:

| | | |
|---|---|---|
| D8-F10 | GLEQGCPWVGLEVQCRGCPS | 1774 |
| F8-B12~ | DLRVLCELFGGAYVLGYCSE | 1775 |
| F8-A9 | PLWGLCELFGGASLFGYCSS | 1776 |

**Based on analysis of entire panning data, amino acid preferences at each position were calculated to define these “idealized” peptides; *Peptides synthesized and currently being purified; ˜Peptides planned.

[0207] In various aspects of the present invention, amino acid sequences comprising Site 1 motifs may bind to Site 1 of IR or Site 1 of IGF-1R. Similarly, amino acids sequences comprising Site 2 motifs may bind to Site 2 of IR or Site 2 of IGF-1R. However, specific peptides may show higher binding affinity for IR than for IGF-1R, while other peptides may show higher binding affinity for IGF-1R than for IR. In addition, Site 1 and Site 2 on IR do not cross-talk, i.e., Site 1-binding sequences do not compete with Site 2-binding sequences at IR. In contrast, Site 1 and Site 2 on IGF-1R do show some cross-talk, suggesting an allosteric effect. These aspects are illustrated in the Examples described hereinbelow.

[0208] E. Multivalent Ligands

[0209] This invention provides ligands that preferentially bind different sites on IR and IGF-1R. The A6 amino acid sequence motif confers binding to IR at Site 1 (FIG. 6). The D8 amino acid sequence motif confers binding to IR at Site 2 (FIG. 6). Accordingly, multimeric ligands may be prepared according to the invention by covalently linking amino acid sequences. Depending on the purpose intended for the multivalent ligand, amino acid sequences that bind the same or different sites may be combined to form a single molecule. Where the multivalent ligand is constructed to bind to the same corresponding site on different receptors, or different subunits of a receptor, the amino acid sequences of the ligand for binding to the receptors may be the same or different, provided that if different amino acid sequences are used, they both bind to the same site.

[0210] Multivalent ligands may be prepared by either expressing amino acid sequences which bind to the individual sites separately and then covalently linking them together, or by expressing the multivalent ligand as a single amino acid sequence which comprises within it the combination of specific amino acid sequences for binding.

[0211] Various combinations of amino acid sequences may be combined to produce multivalent ligands having specific desirable properties. Thus, agonists may be combined with agonists, antagonists combined with antagonists, and agonists combined with antagonists. Combining amino acid sequences that bind to the same site to form a multivalent ligand may be useful to produce molecules that are capable of cross-linking together multiple receptor units. Multivalent ligands may also be constructed to combine amino acid sequences which bind to different sites (FIG. 7).

[0212] In view of the discovery disclosed herein of monomers having agonist properties at IR or IGF-1R, preparation of multivalent ligands may be useful to prepare ligands having more desirable pharmacokinetic properties due to the presence of multiple bind sites on a single molecule. In addition, combining amino acid sequences that bind to different sites with different affinities provides a means for modulating the overall potency and affinity of the ligand for IR or IGF-1R.

[0213] 1. Construction of Hybrids

[0214] In one embodiment, hybrids of at least two peptides (e.g., dimer peptides) may be produced as recombinant fusion polypeptides, which are expressed in any suitable expression system. The polypeptides may bind the receptor as either fusion constructs containing amino acid sequences besides the ligand binding sequences or as cleaved proteins from which signal sequences or other sequences unrelated to ligand binding are removed. Sequences for facilitating purification of the fusion protein may also be expressed as part of the construct. Such sequences optionally may be subsequently removed to produce the mature binding ligand. Recombinant expression also provides means for producing large quantities of ligand. In addition, recombinant expression may be used to express different combinations of amino acid sequences and to vary the orientation of their combination, i.e., amino to carboxyl terminal orientation.

[0215] In one embodiment shown below (FIG. 28), MBP-FLAG®-PEPTIDE-(GGS)ₙ (SEQ ID NO:1777)-PEPTIDE-E-TAG, a fusion construct producing a peptide dimer comprises a maltose binding protein amino acid sequence (MBP) or similar sequence useful for enabling the affinity chromatography purification of the expressed peptide sequences. This purification facilitating sequence may then be attached to a FLAG® sequence to provide a cleavage site to remove the initial sequence. The dimer then follows which includes the intervening linker and a tag sequence may be included at the carboxyl terminal portion to facilitate identification/purification of the expression of peptide. In the representative construct illustrated above, G and S are glycine and serine residues, which make up the linker sequence. As non-limiting examples, n can be 1, 2, 3, or 4 to yield a linker sequence of 3, 6, 9, and 12 amino acids, respectively.

[0216] In addition to producing the dimer peptides by recombinant protein expression, dimer peptides may also be produced by peptide synthesis whereby a synthetic technique such as Merrifield synthesis (Merrifield, 1997), may be used to construct the entire peptide.

[0217] Other methods of constructing dimer peptides include introducing a linker molecule that activates the terminal end of a peptide so that it can covalently bind to a second peptide. Examples of such linkers include, but are not limited to, diaminoproprionic acid activated with an oxyamino function. A preferred linker is a dialdehyde having the formula O═CH—(CH₂)ₙ—CH═O, wherein n is at least 2 to 6, but is preferably 6 to produce a linker of about 25 to 30 angstroms in length. Other preferred linkers are shown in Table 3. Linkers may be used, for example, to couple monomers at either the carboxyl terminal or the amino terminal ends to form dimer peptides. Also, the chemistry can be inverted, i.e., the peptides to be coupled can be equipped with aldehyde functions, either by oxidation with sodium periodate of an N-terminal serine, or by oxidation of any other vicinal hydroxy- or amino-groups, and the linker can comprise two oxyamino functions (e.g., at end of a polyethylene glycol linker) or amino groups which are coupled by reductive amination.

[0218] In specific embodiments, Site 1-Site 2 and Site 2-Site 1 orientations are possible. In addition, N-terminal to N-terminal (N-N); C-terminal to C-terminal (C-C); N-terminal to C-terminal (N-C); and C-terminal to N-terminal (C-N) linkages are possible. Accordingly, peptides may be oriented Site 1 to Site 2, or Site 2 to Site 1, and may be linked N-terminus to N-terminus, C-terminus to C-terminus, N-terminus to C-terminus, or C-terminus to N-terminus. In certain cases, a specific orientation may be preferable to others, for example, for maximal agonist or antagonist activity.

[0219] In an unexpected and surprising result, the orientation and linkage of the monomer subunits has been found to dramatically alter dimer activity (see Examples, below). In particular, certain Site 1/Site 2 heterodimer sequences show agonist or antagonist activity at IR, depending on orientation and linkage of the constituent monomer subunits. For example, a Site 1-Site 2 orientation (C-N linkage), e.g., the S453 heterodimer, shows antagonist activity at IR (FIG. 18A; Table 7). In contrast, a Site 2-Site 1 orientation (C-N linkage), e.g., the S455 heterodimer, shows potent agonist activity at IR (FIG. 18D; Table 7). Similarly, Site 1-Site 2 (C-N linkage) heterodimers, e.g., S425 and S459, show antagonist activity at IR (Table 7), while Site 1-Site 2 (C-C or N-N linkage) heterodimers, e.g., S432-S438, S454, and S456, show agonist activity (Table 7).

[0220] Whether produced by recombinant gene expression or by conventional chemical linkage technology, the various amino acid sequences may be coupled through linkers of various lengths. Where linked sequences are expressed recombinantly, and based on an average amino acid length of about 4 angstroms, the linkers for connecting the two amino acid sequences would typically range from about 3 to about 12 amino acids corresponding to from about 12 to about 48 Å. Accordingly, the preferred distance between binding sequences is from about 2 to about 50 Å. More preferred is 4 to about 40. The degree of flexibility of the linker between the amino acid sequences may be modulated by the choice of amino acids used to construct the linker. The combination of glycine and serine is useful for producing a flexible, relatively unrestrictive linker. A more rigid linker may be constructed by using amino acids with more complex side chains within the linkage sequence.

[0221] 2. Characterization of Specific Dimers

[0222] Specific dimers which are comprised of monomer subunits that both bind with high affinity to the same site on IR or IGF-1R (e.g., Site 1-Site 1 or Site 2-Site 2), or monomer subunits that bind to different sites on IR or IGF-1R (e.g., Site 1-Site 2 or Site 2-Site 1) are disclosed herein.

[0223] Other combinations of peptides are within the scope of this invention and may be determined as demonstrated in the examples described herein.

[0224] F. Peptide Synthesis

[0225] Many conventional techniques in molecular biology, protein biochemistry, and immunology may be used to produce the amino acid sequences for use with this invention. The present invention encompasses the specific amino acid sequences shown in FIGS. 1-4, 8, and 9 and Table 7, inter a/ia, without additions (e.g., linker or spacer sequences) deletions, alterations, or modification. The present invention further encompasses variants that include additional sequences, altered sequences, and functional fragments thereof. In a preferred embodiment, the amino acid sequence variant or fragment shares at least one function characteristic (e.g., binding, agonist, or antagonist activity) of the reference sequence. Variant peptides include, for example, genetically engineered mutants, and may differ from the amino acid sequences shown in the figures and tables of the application by the addition, deletion, or substitution of one or more amino acid residues. Alterations may occur at the amino- or carboxy-terminal positions of the reference amino acid sequence or anywhere between those terminal positions, interspersed either individually among the amino acids in the reference sequence or in one or more contiguous groups within the reference sequence. In addition, variants may comprise synthetic or non-naturally occurring amino acids in accordance with this invention.

[0226] Variant amino acid sequences can have conservative changes, wherein a substituted amino acid has similar structural or chemical properties, e.g., replacement of leucine with isoleucine. More infrequently, a variant peptide can have non-conservative changes, e.g., substitution of a glycine with a tryptophan. Guidance in determining which amino acid residues can be substituted, inserted, or deleted without abolishing binding or biological activity can be found using computer programs well-known in the art, for example, DNASTAR software (DNASTAR, Inc., Madison, Wis.). Guidance is also provided by the data disclosed herein. In particular, FIGS. 1-4, 8, 9, 43, 44, and Table 7, inter alia, teach which amino acid residues can be deleted, added, substituted, or modified, while maintaining the IR- or IGF-1R-related function(s) (e.g., binding, agonist, or antagonist activity) of the amino acid sequences.

[0227] For the purposes of this invention, the amino acids are grouped as follows: amino acids possessing alcohol groups are serine (S) and threonine (T). Aliphatic amino acids are isoleucine (I), leucine (L), valine (V), and methionine (M). Aromatic amino acids are phenylalanine (F), histidine (H), tryptophan (W), and tyrosine (Y). Hydrophobic amino acids are alanine (A), cysteine (C), phenylalanine (F), glycine (G), histidine (H), isoleucine (I), leucine (L), methionine (M), arginine (R), threonine (T), valine (V), tryptophan (W), and tyrosine (Y). Negative amino acids are aspartic acid (D) and glutamic acid (E). The following amino acids are polar amino acids: cysteine (C), aspartic acid (D), glutamic acid (E), histidine (H), lysine (K), asparagine (N), glutamine (Q), arginine (R), serine (S), and threonine (T). Positive amino acids are histidine (H), lysine (K), and arginine (R). Small amino acids are alanine (A), cysteine (C), aspartic acid (D), glycine (G), asparagine (N), proline (P), serine (S), threonine (T), and valine (V). Very small amino acids are alanine (A), glycine (G) and serine (S). Amino acids likely to be involved in a turn formation are alanine (A), cysteine (C), aspartic acid (D), glutamic acid (E), glycine (G), histidine (H), lysine (K), asparagine (N), glutamine (Q), arginine (R), serine (S), proline (P), and threonine (T). As non-limiting examples, the amino acids within each of these defined groups may be substituted for each other in the formulas described above, as conservative substitutions, subject to the specific preferences stated herein.

[0228] Substantial changes in function can be made by selecting substitutions that are less conservative than those shown in the defined groups, above. For example, non-conservative substitutions can be made which more significantly affect the structure of the peptide in the area of the alteration, for example, the alpha-helical, or beta-sheet structure; the charge or hydrophobicity of the molecule at the target site; or the bulk of the side chain. The substitutions which generally are expected to produce the greatest changes in the peptide's properties are those where 1) a hydrophilic residue, e.g., seryl or threonyl, is substituted for (or by) a hydrophobic residue, e.g., leucyl, isoleucyl, phenylalanyl, valyl, or alanyl; 2) a cysteine or proline is substituted for (or by) any other residue; 3) a residue having an electropositive side chain, e.g., lysyl, arginyl, or histidyl, is substituted for (or by) an electronegative residue, e.g., glutamyl or aspartyl; or 4) a residue having a bulky side chain, e.g., phenylalanine, is substituted for (or by) a residue that does not have a side chain, e.g., glycine.

[0229] Amino acid preferences have been identified for certain peptides and peptide groups of the present invention. For example, amino acid preferences for the RP9, D8, and Group 6 (Formula 10) peptides are shown in Tables 17-19, below. In some instances, cysteine pairs may also be preferred. For example, cysteine pairs are preferred in certain Formula 1 and Formula 2 sequences described herein. In accordance with the invention, the amino acid sequences of the invention may include two or more cysteine residues, which may be separated by at least 3, 4, 5, 6, 7, 8, 9, 10, 11, 12, 13, 14, 15, 16, 17, 18, or 19 amino acids, and may be positioned inside or outside the Formula 1 or Formula 2 motif sequence. Preferably, the cysteines are separated by 17 or 18 amino acids.

[0230] Variants also include amino acid sequences in which one or more residues are modified (i.e., by phosphorylation, sulfation, acylation, PEGylation, etc.), and mutants comprising one or more modified residues. Amino acid sequences may also be modified with a label capable of providing a detectable signal, either directly or indirectly, including, but not limited to, radioisotope, fluorescent, and enzyme labels. Fluorescent labels include, for example, Cy₃, Cy₅, Alexa, BODIPY, fluorescein (e.g., FluorX, DTAF, and FITC), rhodamine (e.g., TRITC), auramine, Texas Red, AMCA blue, and Lucifer Yellow. Preferred isotope labels include ³H, ¹⁴C, ³²P, ³⁵S, ³⁶Cl, ⁵¹Cr, ⁵⁷Co, ⁵⁸Co, ⁵⁹Fe, ⁹⁰Y, ¹²⁵I, ¹³¹I, and ¹⁸⁶Re. Preferred enzyme labels include peroxidase, β-glucuronidase, β-D-glucosidase, β-D-galactosidase, urease, glucose oxidase plus peroxidase, and alkaline phosphatase (see, e.g., U.S. Pat. Nos. 3,654,090; 3,850,752 and 4,016,043). Enzymes can be conjugated by reaction with bridging molecules such as carbodiimides, diisocyanates, glutaraldehyde, and the like. Enzyme labels can be detected visually, or measured by calorimetric, spectrophotometric, fluorospectrophotometric, amperometric, or gasometric techniques. Other labeling systems, such as avidin/biotin, Tyramide Signal Amplification (TSA™), are known in the art, and are commercially available (see, e.g., ABC kit, Vector Laboratories, Inc., Burlingame, Calif.; NEN® Life Science Products, Inc., Boston, Mass.).

[0231] 1. Recombinant Synthesis of Peptides

[0232] To obtain recombinant peptides, DNA sequences encoding these peptides may be cloned into any suitable vectors for expression in intact host cells or in cell-free translation systems by methods well-known in the art (see Sambrook et al., 1989). The particular choice of the vector, host, or translation system is not critical to the practice of the invention.

[0233] A large number of vectors, including bacterial, yeast, and mammalian vectors, have been described for replication and/or expression in various host cells or cell-free systems, and may be used for gene therapy as well as for simple cloning or protein expression. In one aspect of the present invention, an expression vector comprises a nucleic acid encoding a IR or IGF-1R agonist or antagonist peptide, as described herein, operably linked to at least one regulatory sequence. Regulatory sequences are known in the art and are selected to direct expression of the desired protein in an appropriate host cell. Accordingly, the term regulatory sequence includes promoters, enhancers and other expression control elements (see D. V. Goeddel (1990) Methods Enzymol. 185:3-7). Enhancer and other expression control sequences are described in Enhancers and Eukaryotic Gene Expression, Cold Spring Harbor Press, Cold Spring Harbor, N.Y. (1983). It should be understood that the design of the expression vector may depend on such factors as the choice of the host cell to be transfected and/or the type of peptide desired to be expressed.

[0234] Several regulatory elements (e.g., promoters) have been isolated and shown to be effective in the transcription and translation of heterologous proteins in the various hosts. Such regulatory regions, methods of isolation, manner of manipulation, etc. are known in the art. Non-limiting examples of bacterial promoters include the β-lactamase (penicillinase) promoter; lactose promoter; tryptophan (trp) promoter; araBAD (arabinose) operon promoter; lambda-derived P₁ promoter and N gene ribosome binding site; and the hybrid tac promoter derived from sequences of the trp and lac UV5 promoters. Non-limiting examples of yeast promoters include the 3-phosphoglycerate kinase promoter, glyceraldehyde-3-phosphate dehydrogenase (GAPDH) promoter, galactokinase (GAL1) promoter, galactoepimerase promoter, and alcohol dehydrogenase (ADH1) promoter. Suitable promoters for mammalian cells include, without limitation, viral promoters, such as those from Simian Virus 40 (SV40), Rous sarcoma virus (RSV), adenovirus (ADV), and bovine papilloma virus (BPV). Preferred replication and inheritance systems include M13, ColE1, SV40, baculovirus, lambda, adenovirus, CEN ARS, 2 μm ARS and the like. While expression vectors may replicate autonomously, they may also replicate by being inserted into the genome of the host cell, by methods well-known in the art.

[0235] To obtain expression in eukaryotic cells, terminator sequences, polyadenylation sequences, and enhancer sequences that modulate gene expression may be required. Sequences that cause amplification of the gene may also be desirable. Furthermore, sequences that facilitate secretion of the recombinant product from cells, including, but not limited to, bacteria, yeast, and animal cells, such as secretory signal sequences and/or preprotein or proprotein sequences, may also be included. These sequences are well-described in the art. DNA sequences can be optimized, if desired, for more efficient expression in a given host organism or expression system. For example, codons can be altered to conform to the preferred codon usage in a given host cell or cell-free translation system using well-established techniques.

[0236] Codon usage data can be obtained from publicly-available sources, for example, the Codon Usage Database at http://www.kazusa.or.jp/codon/. In addition, computer programs that translate amino acid sequence information into nucleotide sequence information in accordance with codon preferences (i.e., backtranslation programs) are widely available. See, for example, Backtranslate program from Genetics Computer Group (GCG), Accelrys, Inc., Madison, Wis.; and Backtranslation Applet from Entelechon GmbH, Regensburg, Germany. Thus, using the peptide sequences disclosed herein, one of ordinary skill in the art can design nucleic acids to yield optimal expression levels in the translation system or host cell of choice.

[0237] Expression and cloning vectors will likely contain a selectable marker, a gene encoding a protein necessary for survival or growth of a host cell transformed with the vector. The presence of this gene ensures growth of only those host cells that express the inserts. Typical selection genes encode proteins that 1) confer resistance to antibiotics or other toxic substances, e.g., ampicillin, neomycin, methotrexate, etc.; 2) complement auxotrophic deficiencies, or 3) supply critical nutrients not available from complex media, e.g., the gene encoding D-alanine racemase for Bacilli. Markers may be an inducible or non-inducible gene and will generally allow for positive selection. Non-limiting examples of markers include the ampicillin resistance marker (i.e., beta-lactamase), tetracycline resistance marker, neomycin/kanamycin resistance marker (i.e., neomycin phosphotransferase), dihydrofolate reductase, glutamine synthetase, and the like. The choice of the proper selectable marker will depend on the host cell, and appropriate markers for different hosts as understood by those of skill in the art.

[0238] Suitable expression vectors for use with the present invention include, but are not limited to, pUC, pBluescript (Stratagene), pET (Novagen, Inc., Madison, Wis.), and pREP (Invitrogen) plasmids. Vectors can contain one or more replication and inheritance systems for cloning or expression, one or more markers for selection in the host, e.g., antibiotic resistance, and one or more expression cassettes. The inserted coding sequences can be synthesized by standard methods, isolated from natural sources, or prepared as hybrids. Ligation of the coding sequences to transcriptional regulatory elements (e.g., promoters, enhancers, and/or insulators) and/or to other amino acid encoding sequences can be carried out using established methods.

[0239] Suitable cell-free expression systems for use with the present invention include, without limitation, rabbit reticulocyte lysate, wheat germ extract, canine pancreatic microsomal membranes, E. Coli S30 extract, and coupled transcription/translation systems (Promega Corp., Madison, Wis.). These systems allow the expression of recombinant peptides upon the addition of cloning vectors, DNA fragments, or RNA sequences containing protein-coding regions and appropriate promoter elements.

[0240] Non-limiting examples of suitable host cells include bacteria, archea, insect, fungi (e.g., yeast), plant, and animal cells (e.g., mammalian, especially human). Of particular interest are Escherichia coli, Bacillus subtilis, Saccharomyces cerevisiae, SF9 cells, C129 cells, 293 cells, Neurospora, and immortalized mammalian myeloid and lymphoid cell lines. Techniques for the propagation of mammalian cells in culture are well-known (see, Jakoby and Pastan (Eds), 1979, Cell Culture. Methods in Enzymology, volume 58, Academic Press, Inc., Harcourt Brace Jovanovich, N.Y.). Examples of commonly used mammalian host cell lines are VERO and HeLa cells, CHO cells, and WI38, BHK, and COS cell lines, although it will be appreciated by the skilled practitioner that other cell lines may be used, e.g., to provide higher expression, or other features.

[0241] Host cells can be transformed, transfected, or infected as appropriate by any suitable method including electroporation, calcium chloride-, lithium chloride-, lithium acetate/polyethylene glycol-, calcium phosphate-, DEAE-dextran-, liposome-mediated DNA uptake, spheroplasting, injection, microinjection, microprojectile bombardment, phage infection, viral infection, or other established methods. Alternatively, vectors containing the nucleic acids of interest can be transcribed in vitro, and the resulting RNA introduced into the host cell by well-known methods, e.g., by injection (see, Kubo et al., 1988, FEBS Letts. 241:119). The cells into which have been introduced nucleic acids described above are meant to also include the progeny of such cells.

[0242] Nucleic acids encoding the peptides of the invention may be isolated directly from recombinant phage libraries (e.g., RAPIDLIB® or GRABLIB® libraries) described herein. Alternatively, the polymerase chain reaction (PCR) method can be used to produce nucleic acids of the invention, using the recombinant phage libraries as templates. Primers used for PCR can be synthesized using the sequence information provided herein and can further be designed to introduce appropriate new restriction sites, if desirable, to facilitate incorporation into a given vector for recombinant expression.

[0243] Nucleic acids encoding the peptides of the present invention can also be produced by chemical synthesis, e.g., by the phosphoramidite method described by Beaucage et al., 1981, Tetra. Letts. 22:1859-1862, or the triester method according to Matteucci et al., 1981, J. Am. Chem. Soc., 103:3185, and can performed on commercial, automated oligonucleotide synthesizers. A double-stranded fragment may be obtained from the single-stranded product of chemical synthesis either by synthesizing the complementary strand and annealing the strands together under appropriate conditions or by adding the complementary strand using DNA polymerase with an appropriate primer sequence.

[0244] The nucleic acids encoding the peptides of the invention can be produced in large quantities by replication in a suitable host cell. Natural or synthetic nucleic acid fragments, comprising at least ten contiguous bases coding for a desired amino acid sequence can be incorporated into recombinant nucleic acid constructs, usually DNA constructs, capable of introduction into and replication in a prokaryotic or eukaryotic cell. Usually the nucleic acid constructs will be suitable for replication in a unicellular host, such as yeast or bacteria, but may also be intended for introduction to (with and without integration within the genome) cultured mammalian or plant or other eukaryotic cells, cell lines, tissues, or organisms. The purification of nucleic acids produced by the methods of the present invention is described, for example, in Sambrook et al., 1989; F. M. Ausubel et al., 1992, Current Protocols in Molecular Biology, J. Wiley and Sons, New York, N.Y.

[0245] These nucleic acids can encode variant or truncated forms of the peptides as well as the reference peptides shown in FIGS. 1-4, 8, and 9 and Table 7, inter alia. Large quantities of the nucleic acids and peptides of the present invention may be prepared by expressing the nucleic acids or portions thereof in vectors or other expression vehicles in compatible prokaryotic or eukaryotic host cells. The most commonly used prokaryotic hosts are strains of Escherichia coli, although other prokaryotes, such as Bacillus subtilis or Pseudomonas may also be used. Mammalian or other eukaryotic host cells, such as those of yeast, filamentous fungi, plant, insect, or amphibian or avian species, may also be useful for production of the proteins of the present invention. For example, insect cell systems (i.e., lepidopteran host cells and baculovirus expression vectors) are particularly suited for large-scale protein production.

[0246] Host cells carrying an expression vector (i.e., transformants or clones) are selected using markers depending on the mode of the vector construction. The marker may be on the same or a different DNA molecule, preferably the same DNA molecule. In prokaryotic hosts, the transformant may be selected, e.g., by resistance to ampicillin, tetracycline or other antibiotics. Production of a particular product based on temperature sensitivity may also serve as an appropriate marker.

[0247] For some purposes, it is preferable to produce the peptide in a recombinant system in which the peptide contains an additional sequence (e.g., epitope or protein) tag that facilitates purification. Non-limiting examples of epitope tags include c-myc, haemagglutinin (HA), polyhistidine (6X-HIS) (SEQ ID NO:1778), GLU-GLU, and DYKDDDDK (SEQ ID NO:1779) or DYKD (SEQ ID NO:1545; FLAG®) epitope tags. Non-limiting examples of protein tags include glutathione-S-transferase (GST), green fluorescent protein (GFP), and maltose binding protein (MBP). In one approach, the coding sequence of a peptide can be cloned into a vector that creates a fusion with a sequence tag of interest. Suitable vectors include, without limitation, PRSET (Invitrogen Corp., San Diego, Calif.), pGEX (Amersham Pharmacia Biotech, Inc., Piscataway, N.J.), pEGFP (CLONTECH Laboratories, Inc., Palo Alto, Calif.), and pMAL™ (New England BioLabs, Inc., Beverly, Mass.) plasmids. Following expression, the epitope or protein tagged peptide can be purified from a crude lysate of the translation system or host cell by chromatography on an appropriate solid-phase matrix. In some cases, it may be preferable to remove the epitope or protein tag (i.e., via protease cleavage) following purification.

[0248] Methods for directly purifying peptides from sources such as cellular or extracellular lysates are well-known in the art (see Harris and Angal, 1989). Such methods include, without limitation, sodium dodecylsulfate-polyacrylamide gel electrophoresis (SDS-PAGE), preparative disc-gel electrophoresis, isoelectric focusing, high-performance liquid chromatography (HPLC), reversed-phase HPLC, gel filtration, ion exchange and partition chromatography, countercurrent distribution, and combinations thereof. Peptides can be purified from many possible sources, for example, plasma, body tissues, or body fluid lysates derived from human or animal, including mammalian, bird, fish, and insect sources.

[0249] Antibody-based methods may also be used to purify peptides. Antibodies that recognize these peptides or fragments derived therefrom can be produced and isolated. The peptide can then be purified from a crude lysate by chromatography on an antibody-conjugated solid-phase matrix (see Harlow and Lane, 1998).

[0250] 2. Chemical Synthesis of Peptides

[0251] Alternately, peptides may be chemically synthesized by commercially available automated procedures, including, without limitation, exclusive solid phase synthesis, partial solid phase methods, fragment condensation or classical solution synthesis. The peptides are preferably prepared by solid-phase peptide synthesis; for example, as described by Merrifield (1965; 1997).

[0252] According to methods known in the art, peptides can be chemically synthesized by commercially available automated procedures, including, without limitation, exclusive solid phase synthesis, partial solid phase methods, fragment condensation, classical solution synthesis. In addition, recombinant and synthetic methods of peptide production can be combined to produce semi-synthetic peptides. The peptides of the invention are preferably prepared by solid phase peptide synthesis as described by Merrifield, 1963, J. Am. Chem. Soc. 85:2149; 1997. In one embodiment, synthesis is carried out with amino acids that are protected at the alpha-amino terminus. Trifunctional amino acids with labile side-chains are also protected with suitable groups to prevent undesired chemical reactions from occurring during the assembly of the peptides. The alpha-amino protecting group is selectively removed to allow subsequent reaction to take place at the amino-terminus. The conditions for the removal of the alpha-amino protecting group do not remove the side-chain protecting groups.

[0253] The alpha-amino protecting groups are those known to be useful in the art of stepwise peptide synthesis. Included are acyl type protecting groups, e.g., formyl, trifluoroacetyl, acetyl, aromatic urethane type protecting groups, e.g., benzyloxycarbonyl (Cbz), substituted benzyloxycarbonyl and 9-fluorenylmethyloxycarbonyl (Fmoc), aliphatic urethane protecting groups, e.g., t-butyloxycarbonyl (Boc), isopropyloxycarbonyl, cyclohexyloxycarbonyl, and alkyl type protecting groups, e.g., benzyl, triphenylmethyl. The preferred protecting group is Boc. The side-chain protecting groups for Tyr include tetrahydropyranyl, tert-butyl, trityl, benzyl, Cbz, 4-Br-Cbz and 2,6-dichlorobenzyl. The preferred side-chain protecting group for Tyr is 2,6-dichlorobenzyl. The side-chain protecting groups for Asp include benzyl, 2,6-dichlorobenzyl, methyl, ethyl, and cyclohexyl. The preferred side-chain protecting group for Asp is cyclohexyl. The side-chain protecting groups for Thr and Ser include acetyl, benzoyl, trityl, tetrahydropyranyl, benzyl, 2,6-dichlorobenzyl, and Cbz. The preferred protecting group for Thr and Ser is benzyl. The side-chain protecting groups for Arg include nitro, Tos, Cbz, adamantyloxycarbonyl, and Boc. The preferred protecting group for Arg is Tos. The side-chain amino group of Lys can be protected with Cbz, 2-Cl-Cbz, Tos, or Boc. The 2-Cl-Cbz group is the preferred protecting group for Lys.

[0254] The side-chain protecting groups selected must remain intact during coupling and not be removed during the deprotection of the amino-terminus protecting group or during coupling conditions. The side-chain protecting groups must also be removable upon the completion of synthesis, using reaction conditions that will not alter the finished peptide.

[0255] Solid phase synthesis is usually carried out from the carboxy-terminus by coupling the alpha-amino protected (side-chain protected) amino acid to a suitable solid support. An ester linkage is formed when the attachment is made to a chloromethyl or hydroxymethyl resin, and the resulting peptide will have a free carboxyl group at the C-terminus. Alternatively, when a benzhydrylamine or p-methylbenzhydrylamine resin is used, an amide bond is formed and the resulting peptide will have a carboxamide group at the C-terminus. These resins are commercially available, and their preparation has described by Stewart et al., 1984, Solid Phase Peptide Synthesis (2nd Edition), Pierce Chemical Co., Rockford, Ill.

[0256] The C-terminal amino acid, protected at the side chain if necessary and at the alpha-amino group, is coupled to the benzhydrylamine resin using various activating agents including dicyclohexylcarbodiimide (DCC), N,N′-diisopropyl-carbodiimide and carbonyldiimidazole. Following the attachment to the resin support, the alpha-amino protecting group is removed using trifluoroacetic acid (TFA) or HCl in dioxane at a temperature between 0 and 25° C. Dimethylsulfide is added to the TFA after the introduction of methionine (Met) to suppress possible S-alkylation. After removal of the alpha-amino protecting group, the remaining protected amino acids are coupled stepwise in the required order to obtain the desired sequence.

[0257] Various activating agents can be used for the coupling reactions including DCC,N,N′-diisopropyl-carbodiimide, benzotriazol-1-yl-oxy-tris-(dimethylamino) phosphonium hexa-fluorophosphate (BOP) and DCC-hydroxybenzotriazole (HOBt). Each protected amino acid is used in excess (>2.0 equivalents), and the couplings are usually carried out in N-methylpyrrolidone (NMP) or in DMF, CH₂Cl₂ or mixtures thereof. The extent of completion of the coupling reaction is monitored at each stage, e.g., by the ninhydrin reaction as described by Kaiser et al., 1970, Anal. Biochem. 34:595. In cases where incomplete coupling is found, the coupling reaction is repeated. The coupling reactions can be performed automatically with commercially available instruments.

[0258] After the entire assembly of the desired peptide, the peptide-resin is cleaved with a reagent such as liquid HF for 1-2 h at 0° C., which cleaves the peptide from the resin and removes all side-chain protecting groups. A scavenger such as anisole is usually used with the liquid HF to prevent cations formed during the cleavage from alkylating the amino acid residues present in the peptide. The peptide-resin can be deprotected with TFA/dithioethane prior to cleavage if desired.

[0259] Side-chain to side-chain cyclization on the solid support requires the use of an orthogonal protection scheme which enables selective cleavage of the side-chain functions of acidic amino acids (e.g., Asp) and the basic amino acids (e.g., Lys). The 9-fluorenylmethyl (Fm) protecting group for the side-chain of Asp and the 9-fluorenylmethyloxycarbonyl (Fmoc) protecting group for the side-chain of Lys can be used for this purpose. In these cases, the side-chain protecting groups of the Boc-protected peptide-resin are selectively removed with piperidine in DMF. Cyclization is achieved on the solid support using various activating agents including DCC, DCC/HOBt, or BOP. The HF reaction is carried out on the cyclized peptide-resin as described above.

[0260] 3. Peptide Libraries

[0261] Peptide libraries produced and screened according to the present invention are useful in providing new ligands for IR and IGF-1R. Peptide libraries can be designed and panned according to methods described in detail herein, and methods generally available to those in the art (see, e.g., U.S. Pat. No. 5,723,286 issued Mar. 3, 1998 to Dower et al.). In one aspect, commercially available phage display libraries can be used (e.g., RAPIDLIB® or GRABLIB®, DGI BioTechnologies, Inc., Edison, N.J.; Ph.D. C7C Disulfide Constrained Peptide Library, New England Biolabs). In another aspect, an oligonucleotide library can be prepared according to methods known in the art, and inserted into an appropriate vector for peptide expression. For example, vectors encoding a bacteriophage structural protein, preferably an accessible phage protein, such as a bacteriophage coat protein, can be used. Although one skilled in the art will appreciate that a variety of bacteriophage may be employed in the present invention, in preferred embodiments the vector is, or is derived from, a filamentous bacteriophage, such as, for example, f1, fd, Pf1, M13, etc. In particular, the fd-tet vector has been extensively described in the literature (see, e.g., Zacher et al., 1980, Gene 9:127-140; Smith et al., 1985, Science 228:1315-1317; Parmley and Smith, 1988, Gene 73:305-318).

[0262] The phage vector is chosen to contain or is constructed to contain a cloning site located in the 5′ region of the gene encoding the bacteriophage structural protein, so that the peptide is accessible to receptors in an affinity enrichment procedure as described hereinbelow. The structural phage protein is preferably a coat protein. An example of an appropriate coat protein is pIII. A suitable vector may allow oriented cloning of the oligonucleotide sequences that encode the peptide so that the peptide is expressed at or within a distance of about 100 amino acid residues of the N-terminus of the mature coat protein. The coat protein is typically expressed as a preprotein, having a leader sequence.

[0263] Thus, desirably the oligonucleotide library is inserted so that the N-terminus of the processed bacteriophage outer protein is the first residue of the peptide, i.e., between the 3′-terminus of the sequence encoding the leader protein and the 5′-terminus of the sequence encoding the mature protein or a portion of the 5′ terminus. The library is constructed by cloning an oligonucleotide which contains the variable region of library members (and any spacers, as discussed below) into the selected cloning site. Using known recombinant DNA techniques (see generally, Sambrook et al., 1989, Molecular Cloning, A Laboratory Manual, 2d ed., Cold Spring Harbor Laboratory Press, Cold Spring Harbor, N.Y., 1989), an oligonucleotide may be constructed which, inter alia; 1) removes unwanted restriction sites and adds desired ones; 2) reconstructs the correct portions of any sequences which have been removed (such as a correct signal peptidase site, for example); 3) inserts the spacer residues, if any; and/or 4) corrects the translation frame (if necessary) to produce active, infective phage.

[0264] The central portion of the oligonucleotide will generally contain one or more IR and/or IGF-1R binding sequences and, optionally, spacer sequences. The sequences are ultimately expressed as peptides (with or without spacers) fused to or in the N-terminus of the mature coat protein on the outer, accessible surface of the assembled bacteriophage particles. The size of the library will vary according to the number of variable codons, and hence the size of the peptides, which are desired. Generally the library will be at least about 10⁶ members, usually at least 10⁷, and typically 10⁸ or more members. To generate the collection of oligonucleotides which forms a series of codons encoding a random collection of amino acids and which is ultimately cloned into the vector, a codon motif is used, such as (NNK)ₓ, where N may be A, C, G, or T (nominally equimolar), K is G or T (nominally equimolar), and x is typically up to about 5, 6, 7, 8, or more, thereby producing libraries of penta-, hexa-, hepta-, and octa-peptides or larger. The third position may also be G or C, designated “S”. Thus, NNK or NNS 1) code for all the amino acids; 2) code for only one stop codon; and 3) reduce the range of codon bias from 6:1 to 3:1.

[0265] It should be understood that, with longer peptides, the size of the library that is generated may become a constraint in the cloning process. The expression of peptides from randomly generated mixtures of oligonucleotides in appropriate recombinant vectors is known in the art (see, e.g., Oliphant et al., Gene 44:177-183). For example, the codon motif (NNK)₆ produces 32 codons, one for each of 12 amino acids, two for each of five amino acids, three for each of three amino acids and one (amber) stop codon. Although this motif produces a codon distribution as equitable as available with standard methods of oligonucleotide synthesis, it results in a bias against peptides containing one-codon residues. In particular, a complete collection of hexacodons contains one sequence encoding each peptide made up of only one-codon amino acids, but contains 729 (3⁶) sequences encoding each peptide with only three-codon amino acids.

[0266] An alternative approach to minimize the bias against one-codon residues involves the synthesis of 20 activated trinucleotides, each representing the codon for one of the 20 genetically encoded amino acids. These are synthesized by conventional means, removed from the support while maintaining the base and 5-OH-protecting groups, and activated by the addition of 3′O-phosphoramidite (and phosphate protection with b-cyanoethyl groups) by the method used for the activation of mononucleosides (see, generally, McBride and Caruthers, 1983, Tetrahedron Letters 22:245). Degenerate oligocodons are prepared using these trimers as building blocks. The trimers are mixed at the desired molar ratios and installed in the synthesizer. The ratios will usually be approximately equimolar, but may be a controlled unequal ratio to obtain the over- to under-representation of certain amino acids coded for by the degenerate oligonucleotide collection. The condensation of the trimers to form the oligocodons is done essentially as described for conventional synthesis employing activated mononucleosides as building blocks (see, e.g., Atkinson and Smith, 1984, Oligonucleotide Synthesis, M. J. Gait, Ed., p. 35-82). This procedure generates a population of oligonucleotides for cloning that is capable of encoding an equal distribution (or a controlled unequal distribution) of the possible peptide sequences. Advantageously, this approach may be employed in generating longer peptide sequences, since the range of bias produced by the (NNK)₆ motif increases by three-fold with each additional amino acid residue.

[0267] When the codon motif is (NNK)ₓ, as defined above, and when x equals 8, there are 2.6×10¹⁰ possible octa-peptides. A library containing most of the octa-peptides may be difficult to produce. Thus, a sampling of the octa-peptides may be accomplished by constructing a subset library using up to about 10% of the possible sequences, which subset of recombinant bacteriophage particles is then screened. If desired, to extend the diversity of a subset library, the recovered phage subset may be subjected to mutagenesis and then subjected to subsequent rounds of screening. This mutagenesis step may be accomplished in two general ways: the variable region of the recovered phage may be mutagenized, or additional variable amino acids may be added to the regions adjoining the initial variable sequences.

[0268] To diversify around active peptides (i.e., binders) found in early rounds of panning, the positive phage can sequenced to determine the identity of the active peptides. Oligonucleotides can then be synthesized based on these peptide sequences. The syntheses are done with a low level of all bases incorporated at each step to produce slight variations of the primary oligonucleotide sequences. This mixture of (slightly) degenerate oligonucleotides can then be cloned into the affinity phage by methods known to those in the art. This method produces systematic, controlled variations of the starting peptide sequences as part of a secondary library. It requires, however, that individual positive phage be sequenced before mutagenesis, and thus is useful for expanding the diversity of small numbers of recovered phage.

[0269] An alternate approach to diversify the selected phage allows the mutagenesis of a pool, or subset, of recovered phage. In accordance with this approach, phage recovered from panning are pooled and single stranded DNA is isolated. The DNA is mutagenized by treatment with, e.g., nitrous acid, formic acid, or hydrazine. These treatments produce a variety of damage to the DNA. The damaged DNA is then copied with reverse transcriptase, which misincorporates bases when it encounters a site of damage. The segment containing the sequence encoding the receptor-binding peptide is then isolated by cutting with restriction nuclease(s) specific for sites flanking the peptide coding sequence. This mutagenized segment is then recloned into undamaged vector DNA, the DNA is transformed into cells, and a secondary library according to known methods. General mutagenesis methods are known in the art (see Myers et al., 1985, Nucl. Acids Res. 13:3131-3145; Myers et al., 1985, Science 229:242-246; Myers, 1989, Current Protocols in Molecular Biology Vol. I, 8.3.1-8.3.6, F. Ausubel et al., eds, J. Wiley and Sons, New York).

[0270] In another general approach, the addition of amino acids to a peptide or peptides found to be active, can be carried out using various methods. In one, the sequences of peptides selected in early panning are determined individually and new oligonucleotides, incorporating the determined sequence and an adjoining degenerate sequence, are synthesized. These are then cloned to produce a secondary library. Alternatively, methods can be used to add a second IR or IGF-1R binding sequence to a pool of peptide-bearing phage. In accordance with one method, a restriction site is installed next to the first IR or IGF-1R binding sequence. Preferably, the enzyme should cut outside of its recognition sequence. The recognition site may be placed several bases from the first binding sequence. To insert a second IR or IGF-1R binding sequence, the pool of phage DNA is digested and blunt-ended by filling in the overhang with Klenow fragment. Double-stranded, blunt-ended, degenerately synthesized oligonucleotides are then ligated into this site to produce a second binding sequence juxtaposed to the first binding sequence. This secondary library is then amplified and screened as before.

[0271] While in some instances it may be appropriate to synthesize longer peptides to bind certain receptors, in other cases it may be desirable to provide peptides having two or more IR or IGF-1R binding sequences separated by spacer (e.g., linker) residues. For example, the binding sequences may be separated by spacers that allow the regions of the peptides to be presented to the receptor in different ways. The distance between binding regions may be as little as 1 residue, or at least 2-20 residues, or up to at least 100 residues. Preferred spacers are 3, 6, 9, 12, 15, or 18 residues in length. For probing large binding sites or tandem binding sites (e.g., Site 1 and Site 2 of IR), the binding regions may be separated by a spacer of residues of up to 20 to 30 amino acids. The number of spacer residues when present will typically be at least 2 residues, and often will be less than 20 residues.

[0272] The oligonucleotide library may have binding sequences which are separated by spacers (e.g., linkers), and thus may be represented by the formula: (NNK)_{y}−(abc)ₙ−(NNK)_{z} where N and K are as defined previously (note that S as defined previously may be substituted for K), and y+z is equal to about 5, 6, 7, 8, or more, a, b and c represent the same or different nucleotides comprising a codon encoding spacer amino acids, n is up to about 3, 6, 9, or 12 amino acids, or more. The spacer residues may be somewhat flexible, comprising oligo-glycine, or oligo-glycine-glycine-serine, for example, to provide the diversity domains of the library with the ability to interact with sites in a large binding site relatively unconstrained by attachment to the phage protein. Rigid spacers, such as, e.g., oligo-proline, may also be inserted separately or in combination with other spacers, including glycine spacers. It may be desired to have the IR or IGF-1R binding sequences close to one another and use a spacer to orient the binding sequences with respect to each other, such as by employing a turn between the two sequences, as might be provided by a spacer of the sequence glycine-proline-glycine, for example. To add stability to such a turn, it may be desirable or necessary to add cysteine residues at either or both ends of each variable region. The cysteine residues would then form disulfide bridges to hold the variable regions together in a loop, and in this fashion may also serve to mimic a cyclic peptide. Of course, those skilled in the art will appreciate that various other types of covalent linkages for cyclization may also be used.

[0273] Spacer residues as described above may also be situated on either or both ends of the IR or IGF-1R binding sequences. For instance, a cyclic peptide may be designed without an intervening spacer, by having a cysteine residue on both ends of the peptide. As described above, flexible spacers, e.g., oligo-glycine, may facilitate interaction of the peptide with the selected receptors. Alternatively, rigid spacers may allow the peptide to be presented as if on the end of a rigid arm, where the number of residues, e.g., proline residues, determines not only the length of the arm but also the direction for the arm in which the peptide is oriented. Hydrophilic spacers, made up of charged and/or uncharged hydrophilic amino acids, (e.g., Thr, H is, Asn, Gln, Arg, Glu, Asp, Met, Lys, etc.), or hydrophobic spacers of hydrophobic amino acids (e.g., Phe, Leu, Ile, Gly, Val, Ala, etc.) may be used to present the peptides to receptor binding sites with a variety of local environments.

[0274] Notably, some peptides, because of their size and/or sequence, may cause severe defects in the infectivity of their carrier phage. This causes a loss of phage from the population during reinfection and amplification following each cycle of panning. To minimize problems associated with defective infectivity, DNA prepared from the eluted phage can be transformed into appropriate host cells, such as, e.g., E. coli, preferably by electroporation (see, e.g., Dower et al., Nucl. Acids Res. 16:6127-6145), or well-known chemical means. The cells are cultivated for a period of time sufficient for marker expression, and selection is applied as typically done for DNA transformation. The colonies are amplified, and phage harvested for affinity enrichment in accordance with established methods. Phage identified in the affinity enrichment may be re-amplified by infection into the host cells. The successful transformants are selected by growth in an appropriate antibiotic(s), e.g., tetracycline or ampicillin. This may be done on solid or in liquid growth medium.

[0275] For growth on solid medium, the cells are grown at a high density (about 10⁸ to 10⁹ transformants per m²) on a large surface of, for example, L-agar containing the selective antibiotic to form essentially a confluent lawn. The cells and extruded phage are scraped from the surface and phage are prepared for the first round of panning (see, e.g., Parmley and Smith, 1988, Gene 73:305-318). For growth in liquid culture, cells may be grown in L-broth and antibiotic through about 10 or more doublings. The phage are harvested by standard procedures (see Sambrook et al., 1989, Molecular Cloning, 2^{nd} ed.). Growth in liquid culture may be more convenient because of the size of the libraries, while growth on solid media likely provides less chance of bias during the amplification process.

[0276] For affinity enrichment of desired clones, generally about 10³ to 10⁴ library equivalents (a library equivalent is one of each recombinant; 10⁴ equivalents of a library of 10⁹ members is 10⁹×10⁴=10¹³ phage), but typically at least 102 library equivalents, up to about 10⁵ to 10⁶, are incubated with a receptor (or portion thereof) to which the desired peptide is sought. The receptor is in one of several forms appropriate for affinity enrichment schemes. In one example the receptor is immobilized on a surface or particle, and the library of phage bearing peptides is then panned on the immobilized receptor generally according to procedures known in the art. In an alternate scheme, a receptor is attached to a recognizable ligand (which may be attached via a tether). A specific example of such a ligand is biotin. The receptor, so modified, is incubated with the library of phage and binding occurs with both reactants in solution. The resulting complexes are then bound to streptavidin (or avidin) through the biotin moiety. The streptavidin may be immobilized on a surface such as a plastic plate or on particles, in which case the complexes (phage/peptide/receptor/biotin/streptavidin) are physically retained; or the streptavidin may be labeled, with a fluorophor, for example, to tag the active phage/peptide for detection and/or isolation by sorting procedures, e.g., on a fluorescence-activated cell sorter.

[0277] Phage that associate with IR or IGF-1R via non-specific interactions are removed by washing. The degree and stringency of washing required will be determined for each receptor/peptide of interest. A certain degree of control can be exerted over the binding characteristics of the peptides recovered by adjusting the conditions of the binding incubation and the subsequent washing. The temperature, pH, ionic strength, divalent cation concentration, and the volume and duration of the washing will select for peptides within particular ranges of affinity for the receptor. Selection based on slow dissociation rate, which is usually predictive of high affinity, is the most practical route. This may be done either by continued incubation in the presence of a saturating amount of free ligand, or by increasing the volume, number, and length of the washes. In each case, the rebinding of dissociated peptide-phage is prevented, and with increasing time, peptide-phage of higher and higher affinity are recovered. Additional modifications of the binding and washing procedures may be applied to find peptides that bind receptors under special conditions. Once a peptide sequence that imparts some affinity and specificity for the receptor molecule is known, the diversity around this binding motif may be embellished. For instance, variable peptide regions may be placed on one or both ends of the identified sequence. The known sequence may be identified from the literature, or may be derived from early rounds of panning in the context of the present invention.

[0278] G. Screening Assays

[0279] In another embodiment of this invention, screening assays to identify pharmacologically active ligands at IR and/or IGF-1R are provided. Ligands may encompass numerous chemical classes, though typically they are organic molecules, preferably small organic compounds having a molecular weight of more than 50 and less than about 2,500 daltons. Such ligands can comprise functional groups necessary for structural interaction with proteins, particularly hydrogen bonding, and typically include at least an amine, carbonyl, hydroxyl or carboxyl group, preferably at least two of the functional chemical groups. Ligands often comprise cyclical carbon or heterocyclic structures and/or aromatic or polyaromatic structures substituted with one or more of the above functional groups. Ligands can also comprise biomolecules including peptides, saccharides, fatty acids, steroids, purines, pyrimidines, derivatives, structural analogs, or combinations thereof.

[0280] Ligands may include, for example, 1) peptides such as soluble peptides, including Ig-tailed fusion peptides and members of random peptide libraries (see, e.g., Lam et al., 1991, Nature 354:82-84; Houghten et al., 1991, Nature 354:84-86) and combinatorial chemistry-derived molecular libraries made of D- and/or L-configuration amino acids; 2) phosphopeptides (e.g., members of random and partially degenerate, directed phosphopeptide libraries, see, e.g., Songyang et al, 1993, Cell 72:767-778); 3) antibodies (e.g., polyclonal, monoclonal, humanized, anti-idiotypic, chimeric, and single chain antibodies as well as Fab, F(ab′)₂, Fab expression library fragments, and epitope-binding fragments of antibodies); and 4) small organic and inorganic molecules.

[0281] Ligands can be obtained from a wide variety of sources including libraries of synthetic or natural compounds. Synthetic compound libraries are commercially available from, for example, Maybridge Chemical Co. (Trevillet, Cornwall, UK), Comgenex (Princeton, N.J.), Brandon Associates (Merrimack, N.H.), and Microsource (New Milford, Conn.). A rare chemical library is available from Aldrich Chemical Company, Inc. (Milwaukee, Wis.). Natural compound libraries comprising bacterial, fungal, plant or animal extracts are available from, for example, Pan Laboratories (Bothell, Wash.). In addition, numerous means are available for random and directed synthesis of a wide variety of organic compounds and biomolecules, including expression of randomized oligonucleotides.

[0282] Alternatively, libraries of natural compounds in the form of bacterial, fungal, plant and animal extracts can be readily produced. Methods for the synthesis of molecular libraries are readily available (see, e.g., DeWitt et al., 1993, Proc. Natl. Acad. Sci. USA 90:6909; Erb et al., 1994, Proc. Natl. Acad. Sci. USA 91:11422; Zuckermann et al., 1994, J. Med. Chem. 37:2678; Cho et al., 1993, Science 261:1303; Carell et al., 1994, Angew. Chem. Int. Ed. Engl. 33:2059; Carell et al., 1994, Angew. Chem. Int. Ed. Engl. 33:2061; and in Gallop et al., 1994, J. Med. Chem. 37:1233). In addition, natural or synthetic compound libraries and compounds can be readily modified through conventional chemical, physical and biochemical means (see, e.g., Blondelle et al., 1996, Trends in Biotech. 14:60), and may be used to produce combinatorial libraries. In another approach, previously identified pharmacological agents can be subjected to directed or random chemical modifications, such as acylation, alkylation, esterification, amidification, and the analogs can be screened for IR-modulating activity.

[0283] Numerous methods for producing combinatorial libraries are known in the art, including those involving biological libraries; spatially addressable parallel solid phase or solution phase libraries; synthetic library methods requiring deconvolution; the ‘one-bead one-compound’ library method; and synthetic library methods using affinity chromatography selection. The biological library approach is limited to polypeptide or peptide libraries, while the other four approaches are applicable to polypeptide, peptide, non-peptide oligomer, or small molecule libraries of compounds (K. S. Lam, 1997, Anticancer Drug Des. 12:145).

[0284] Libraries may be screened in solution by methods generally known in the art for determining whether ligands competitively bind at a common binding site. Such methods may including screening libraries in solution (e.g., Houghten, 1992, Biotechniques 13:412-421), or on beads (Lam, 1991, Nature 354:82-84), chips (Fodor, 1993, Nature 364:555-556), bacteria or spores (Ladner U.S. Pat. No. 5,223,409), plasmids (Cull et al., 1992, Proc. Natl. Acad. Sci. USA 89:1865-1869), or on phage (Scott and Smith, 1990, Science 249:386-390; Devlin, 1990, Science 249:404-406; Cwirla et al., 1990, Proc. Natl. Acad. Sci. USA 97:6378-6382; Felici, 1991, J. Mol. Biol. 222:301-310; Ladner, supra).

[0285] Where the screening assay is a binding assay, IR, or one of the IR-binding peptides disclosed herein, may be joined to a label, where the label can directly or indirectly provide a detectable signal. Various labels include radioisotopes, fluorescent molecules, chemiluminescent molecules, enzymes, specific binding molecules, particles, e.g., magnetic particles, and the like. Specific binding molecules include pairs, such as biotin and streptavidin, digoxin and antidigoxin, etc. For the specific binding members, the complementary member would normally be labeled with a molecule that provides for detection, in accordance with known procedures.

[0286] A variety of other reagents may be included in the screening assay. These include reagents like salts, neutral proteins, e.g., albumin, detergents, etc., which are used to facilitate optimal protein-protein binding and/or reduce non-specific or background interactions. Reagents that improve the efficiency of the assay, such as protease inhibitors, nuclease inhibitors, anti-microbial agents, etc., may be used. The components are added in any order that produces the requisite binding. Incubations are performed at any temperature that facilitates optimal activity, typically between 4° and 40° C. Incubation periods are selected for optimum activity, but may also be optimized to facilitate rapid high-throughput screening. Normally, between 0.1 and 1 h will be sufficient. In general, a plurality of assay mixtures is run in parallel with different test agent concentrations to obtain a differential response to these concentrations. Typically, one of these concentrations serves as a negative control, i.e., at zero concentration or below the level of detection.

[0287] The screening assays provided in accordance with this invention are based on those disclosed in International application WO 96/04557, which is incorporated herein in its entirety. Briefly, WO 96/04557 discloses the use of reporter peptides that bind to active sites on targets and possess agonist or antagonist activity at the target. These reporters are identified from recombinant libraries and are either peptides with random amino acid sequences or variable antibody regions with at least one CDR region that has been randomized (rVab). The reporter peptides may be expressed in cell recombinant expression systems, such as for example in E. coli, or by phage display (see WO 96/04557 and Kay et al. 1996, Mol. Divers. 1(2):139-40, both of which are incorporated herein by reference). The reporters identified from the libraries may then be used in accordance with this invention either as therapeutics themselves, or in competition binding assays to screen for other molecules, preferably small, active molecules, which possess similar properties to the reporters and may be developed as drug candidates to provide agonist or antagonist activity. Preferably, these small organic molecules are orally active.

[0288] The basic format of an in vitro competitive receptor binding assay as the basis of a heterogeneous screen for small organic molecular replacements for insulin may be as follows: occupation of the active site of IR is quantified by time-resolved fluorometric detection (TRFD) with streptavidin-labeled europium (saEu) complexed to biotinylated peptides (bP). In this assay, saEu forms a ternary complex with bP and IR (i.e., IR:bP:saEu complex). The TRFD assay format is well-established, sensitive, and quantitative (Tompkins et al., 1993, J. Immunol. Methods 163:209-216). The assay can use a single-chain antibody or a biotinylated peptide. Furthermore, both assay formats faithfully report the competition of the biotinylated ligands binding to the active site of IR by insulin.

[0289] In these assays, soluble IR is coated on the surface of microtiter wells, blocked by a solution of 0.5% bovine serum albumin (BSA) and 2% non-fat milk in PBS, and then incubated with biotinylated peptide or rVab. Unbound bP is then washed away and saEu is added to complex with receptor-bound bP. Upon addition of the acidic enhancement solution, the bound europium is released as free Eu³⁺ which rapidly forms a highly fluorescent and stable complex with components of the enhancement solution. The IR:bP bound saEu is then converted into its highly fluorescent state and detected by a detector such as Wallac Victor II (EG&G Wallac, Inc.)

[0290] Phage display libraries can also be screened for ligands that bind to IR or IGF-1R, as described above. Details of the construction and analyses of these libraries, as well as the basic procedures for biopanning and selection of binders, have been published (see, e.g., WO 96/04557; Mandecki et al., 1997, Display Technologies—Novel Targets and Strategies, P. Guttry (ed), International Business Communications, Inc. Southborogh, Mass., pp. 231-254; Ravera et al., 1998, Oncogene 16:1993-1999; Scott and Smith, 1990, Science 249:386-390); Grihalde et al., 1995, Gene 166:187-195; Chen et al., 1996, Proc. Natl. Acad. Sci. USA 93:1997-2001; Kay et al., 1993, Gene 128:59-65; Carcamo et al., 1998, Proc. Natl. Acad. Sci. USA 95:11146-11151; Hoogenboom, 1997, Trends Biotechnol. 15:62-70; Rader and Barbas, 1997, Curr. Opin. Biotechnol. 8:503-508; all of which are incorporated herein by reference).

[0291] The designing of mimetics to a known pharmaceutically active compound is a known approach to the development of pharmaceuticals based on a “lead” compound. This might be desirable where the active compound is difficult or expensive to synthesize or where it is unsuitable for a particular method of administration, e.g., peptides are generally unsuitable active agents for oral compositions as they tend to be quickly degraded by proteases in the alimentary canal. Mimetic design, synthesis, and testing are generally used to avoid large-scale screening of molecules for a target property.

[0292] There are several steps commonly taken in the design of a mimetic from a compound having a given target property. First, the particular parts of the compound that are critical and/or important in determining the target property are determined. In the case of a peptide, this can be done by systematically varying the amino acid residues in the peptide (e.g., by substituting each residue in turn). These parts or residues constituting the active region of the compound are known as its “pharmacophore”.

[0293] Once the pharmacophore has been found, its structure is modeled according to its physical properties (e.g., stereochemistry, bonding, size, and/or charge), using data from a range of sources (e.g., spectroscopic techniques, X-ray diffraction data, and NMR). Computational analysis, similarity mapping (which models the charge and/or volume of a pharmacophore, rather than the bonding between atoms), and other techniques can be used in this modeling process.

[0294] In a variant of this approach, the three dimensional structure of the ligand and its binding partner are modeled. This can be especially useful where the ligand and/or binding partner change conformation on binding, allowing the model to take account of this in the design of the mimetic.

[0295] A template molecule is then selected, and chemical groups that mimic the pharmacophore can be grafted onto the template. The template molecule and the chemical groups grafted on to it can conveniently be selected so that the mimetic is easy to synthesize, is likely to be pharmacologically acceptable, does not degrade in vivo, and retains the biological activity of the lead compound. The mimetics found are then screened to ascertain the extent they exhibit the target property, or to what extent they inhibit it. Further optimization or modification can then be carried out to arrive at one or more final mimetics for in vivo or clinical testing.

[0296] This invention provides specific IR and IGF-1R amino acid sequences that function as either agonists or antagonists at IR and/or IGF-1R. Additional sequences may be obtained in accordance with the procedures described herein.

[0297] H. Use of the Peptides Provided by this Invention

[0298] The IR and IGF-1R agonist and antagonist peptides provided by this invention are useful as lead compounds for identifying other more potent or selective therapeutics, assay reagents for identifying other useful ligands by, for example, competition screening assays, as research tools for further analysis of IR and IGF-1R, and as potential therapeutics in pharmaceutical compositions. In one embodiment, one or more of the disclosed peptides can be provided as components in a kit for identifying other ligands (e.g., small, organic molecules) that bind to IR or IGF-1R. Such kits may also comprise IR or IGF-1R, or functional fragments thereof. The peptide and receptor components of the kit may be labeled (e.g., by radioisotopes, fluorescent molecules, chemiluminescent molecules, enzymes or other labels), or may be unlabeled and labeling reagents may be provided. The kits may also contain peripheral reagents such as buffers, stabilizers, etc. Instructions for use can also be provided.

[0299] In another embodiment, the peptide sequences provided by this invention can be used to design secondary peptide libraries, which are derived from the peptide sequences, and include members that bind to Site 1 and/or Site 2 of IR or IGF-1R. Such libraries can be used to identify sequence variants that increase or otherwise modulate the binding and/or activity of the original peptide at IR or IGF-1R, as described in the related applications of Beasley et al. International Application PCT/US00/08528, filed Mar. 29, 2000, and Beasley et al., U.S. application Ser. No. 09/538,038, filed Mar. 29, 2000, in accordance with well-established techniques.

[0300] IR agonist amino acid sequences provided by this invention are useful as insulin analogs and may therefore be developed as treatments for diabetes or other diseases associated with a decreased response or production of insulin. For use as an insulin supplement or replacement, amino acid sequences include D117/H2C: FHENFYDWFVRQVSK (SEQ ID NO:1780); D117/H2C minus terminal lysine: FHENFYDWFVRQVS (SEQ ID NO:1557); D118: DYKDFYDAIQLVRSARAGGTRDKK (SEQ ID NO:1781); D118 minus FLAG® tag and terminal lysines: FYDAIQLVRSARAGGTRD (SEQ ID NO:1782); D119: KDRAFYNGLRDLVGAVYGAWDKK (SEQ ID NO:1733); D119 minus terminal lysines: KDRAFYNGLRDLVGAVYGAWD (residues 1-21 of SEQ ID NO:1733); D116/JBA5: DYKDLCQSWGVRIGWLAGLCPKK (SEQ ID NO:1541); D116/JBA5 minus FLAG® tag and terminal lysines: LCQSWGVRIGWLAGLCP (SEQ ID NO:1542); D113/H2: DYKDVTFTSAVFHENFYDWFVRQVSKK (SEQ ID NO:1783); D113/H2 minus FLAG® tag and terminal lysines: VTFTSAVFHENFYDWFVRQVS (SEQ ID NO:1784); and S175: GRVDWLQRNANFYDWFVAELG (SEQ ID NO:1560). Preferred peptide dimer sequences are represented by S325, S332, S333, S335, S337, S353, S374-S376, S378, S379, S381, S414, S415, and S418 (see Table 7). Other preferred dimers sequences are represented by S455, S457, S458, S467, S468, S471, S499, S510, S518, S519, and S520 sequences (see Table 7). Especially preferred is the S519 dimer sequence, which shows in vitro and in vivo activity comparable to insulin (see FIGS. 31A-C, 32A-B, and 33).

[0301] IGF-1R antagonist amino acid sequences provided by this invention are useful as treatments for cancers, including, but not limited to, breast, prostate, colorectal, and ovarian cancers. Human and breast cancers are responsible for over 40,000 deaths per year, as present treatments such as surgery, chemotherapy, radiation therapy, and immunotherapy show limited success. The IGF-1R antagonist amino acid sequences disclosed herein are also useful for the treatment or prevention of diabetic retinopathy. Recent reports have shown that a previously identified IGF-1R antagonist can suppress retinal neovascularization, which causes diabetic retinopathy (Smith et al., 1999, Nat. Med. 5:1390-1395). Preferred IGF-1R antagonist amino acid sequences include those comprising the sequences of RP33-IGF and RP33K-IGF (Tables 24-26).

[0302] IGF-1R agonist amino acid sequences provided by this invention are useful for development as treatments for neurological disorders, including stroke and diabetic neuropathy. Reports of several different groups implicate IGF-1R in the reduction of global brain ischemia, and support the use of IGF-1 for the treatment of diabetic neuropathy (reviewed in Auer et al., 1998, Neurology 51:S39-S43; Apfel, 1999, Am. J. Med. 107:34 S-42S). The IGF-1R agonist peptides of the invention may be useful for enhancing the survival of cells and/or blocking apoptosis in cells. Preferred IGF-1R agonist amino acid sequences include those comprising the sequences of G33, RP48, RP60, and RP30-IGF-12-RP31-IGF (Tables 27-29).

[0303] I. Methods of Administration

[0304] The amino acid sequences of this invention may be administered as pharmaceutical compositions comprising standard carriers known in the art for delivering proteins and peptides and by gene therapy. Preferably, a pharmaceutical composition includes, in admixture, a pharmaceutically (i.e., physiologically) acceptable carrier, excipient, or diluent, and one or more of an IR or IGF-1R agonist or antagonist peptide, as an active ingredient. The preparation of pharmaceutical compositions that contain peptides as active ingredients is well understood in the art. Typically, such compositions are prepared as injectables, either as liquid solutions or suspensions, however, solid forms suitable for solution in, or suspension in, liquid prior to injection can also be prepared. The preparation can also be emulsified. The active therapeutic ingredient is often mixed with excipients that are pharmaceutically (i.e., physiologically) acceptable and compatible with the active ingredient. Suitable excipients are, for example, water, saline, dextrose, glycerol, ethanol, or the like and combinations thereof. In addition, if desired, the composition can contain minor amounts of auxiliary substances such as wetting or emulsifying agents, pH-buffering agents, which enhance the effectiveness of the active ingredient.

[0305] An IR or IGF-1R agonist or antagonist peptide can be formulated into a pharmaceutical composition as neutralized physiologically acceptable salt forms. Suitable salts include the acid addition salts (i.e., formed with the free amino groups of the peptide molecule) and which are formed with inorganic acids such as, for example, hydrochloric or phosphoric acids, or such organic acids as acetic, oxalic, tartaric, mandelic, and the like. Salts formed from the free carboxyl groups can also be derived from inorganic bases such as, for example, sodium, potassium, ammonium, calcium, or ferric hydroxides, and such organic bases as isopropylamine, trimethylamine, 2-ethylamino ethanol, histidine, procaine, and the like.

[0306] The pharmaceutical compositions can be administered systemically by oral or parenteral routes. Non-limiting parenteral routes of administration include subcutaneous, intramuscular, intraperitoneal, intravenous, transdermal, inhalation, intranasal, intra-arterial, intrathecal, enteral, sublingual, or rectal. Due to the labile nature of the amino acid sequences parenteral administration is preferred. Preferred modes of administration include aerosols for nasal or bronchial absorption; suspensions for intravenous, intramuscular, intrasternal or subcutaneous, injection; and compounds for oral administration.

[0307] Intravenous administration, for example, can be performed by injection of a unit dose. The term “unit dose” when used in reference to a pharmaceutical composition of the present invention refers to physically discrete units suitable as unitary dosage for humans, each unit containing a predetermined quantity of active material calculated to produce the desired therapeutic effect in association with the required diluent; i.e., liquid used to dilute a concentrated or pure substance (either liquid or solid), making that substance the correct (diluted) concentration for use. For injectable administration, the composition is in sterile solution or suspension or may be emulsified in pharmaceutically- and physiologically-acceptable aqueous or oleaginous vehicles, which may contain preservatives, stabilizers, and material for rendering the solution or suspension isotonic with body fluids (i.e., blood) of the recipient.

[0308] Excipients suitable for use are water, phosphate buffered saline, pH 7.4, 0.15 M aqueous sodium chloride solution, dextrose, glycerol, dilute ethanol, and the like, and mixtures thereof. Illustrative stabilizers are polyethylene glycol, proteins, saccharides, amino acids, inorganic acids, and organic acids, which may be used either on their own or as admixtures. The amounts or quantities, as well as routes of administration, used are determined on an individual basis, and correspond to the amounts used in similar types of applications or indications known to those of skill in the art.

[0309] Pharmaceutical compositions are administered in a manner compatible with the dosage formulation, and in a therapeutically effective amount. The quantity to be administered depends on the subject to be treated, capacity of the subject's immune system to utilize the active ingredient, and degree of modulation of IR or IGF-1R activity desired. Precise amounts of active ingredient required to be administered depend on the judgment of the practitioner and are specific for each individual. However, suitable dosages may range from about 10 to 200 nmol active peptide per kilogram body weight of individual per day and depend on the route of administration. Suitable regimes for initial administration and booster shots are also variable, but are typified by an initial administration followed by repeated doses at one or more hour intervals by a subsequent injection or other administration. Alternatively, continuous intravenous infusions sufficient to maintain picomolar concentrations (e.g., approximately 1 pM to approximately 10 nM) in the blood are contemplated. An exemplary formulation comprises the IR or IGF-1R agonist or antagonist peptide in a mixture with sodium busulfite USP (3.2 mg/ml); disodium edetate USP (0.1 mg/ml); and water for injection q.s.a.d. (1 ml).

[0310] Further guidance in preparing pharmaceutical formulations can be found in, e.g., Gilman et al. (eds), 1990, Goodman and Gilman's: The Pharmacological Basis of Therapeutics, 8th ed., Pergamon Press; and Remington's Pharmaceutical Sciences, 17th ed., 1990, Mack Publishing Co., Easton, Pa.; Avis et al. (eds), 1993, Pharmaceutical Dosage Forms: Parenteral Medications, Dekker, New York; Lieberman et al. (eds), 1990, Pharmaceutical Dosage Forms: Disperse Systems, Dekker, N.Y.

[0311] The present invention further contemplates compositions comprising an IR or IGF-1R agonist or antagonist peptide, and a physiologically acceptable carrier, excipient, or diluent as described in detail herein.

[0312] The constructs as described herein may also be used in gene transfer and gene therapy methods to allow the expression of one or more amino acid sequences of the present invention. The amino acid sequences of the present invention can be used for gene therapy and thereby provide an alternative method of treating diabetes which does not rely on the administration or expression of insulin. Expressing insulin for use in gene therapy requires the expression of a precursor product, which must then undergo processing including cleavage and disulfide bond formation to form the active product. The amino acid sequences of this invention, which possess activity, are relatively small, and thus do not require the complex processing steps to become active. Accordingly, these sequences provide a more suitable product for gene therapy.

[0313] Gene transfer systems known in the art may be useful in the practice of the gene therapy methods of the present invention. These include viral and non-viral transfer methods. A number of viruses have been used as gene transfer vectors, including polyoma, i.e., SV40 (Madzak et al., 1992, J. Gen. Virol., 73:1533-1536), adenovirus (Berkner, 1992, Curr. Top. Microbiol. Immunol., 158:39-6; Berkner et al., 1988, Bio Techniques, 6:616-629; Gorziglia et al., 1992, J. Virol., 66:4407-4412; Quantin et al., 1992, Proc. Natl. Acad. Sci. USA, 89:2581-2584; Rosenfeld et al., 1992, Cell, 68:143-155; Wilkinson et al., 1992, Nucl. Acids Res., 20:2233-2239; Stratford-Perricaudet et al., 1990, Hum. Gene Ther., 1:241-256), vaccinia virus (Mackett et al., 1992, Biotechnology, 24:495-499), adeno-associated virus (Muzyczka, 1992, Curr. Top. Microbiol. Immunol. 158:91-123; Ohi et al., 1990, Gene, 89:279-282), herpes viruses including HSV and EBV (Margolskee, 1992, Curr. Top. Microbiol. Immunol. 158:67-90; Johnson et al., 1992, J. Virol., 66:2952-2965; Fink et al., 1992, Hum. Gene Ther. 3:11-19; Breakfield et al., 1987, Mol. Neurobiol., 1:337-371; Fresse et al., 1990, Biochem. Pharmacol. 40:2189-2199), and retroviruses of avian (Brandyopadhyay et al., 1984, Mol. Cell. Biol., 4:749-754; Petropouplos et al., 1992, J. Virol., 66:3391-3397), murine (Miller, 1992, Curr. Top. Microbiol. Immunol. 158:1-24; Miller et al., 1985, Mol. Cell. Biol., 5:431-437; Sorge et al., 1984, Mol. Cell. Biol., 4:1730-1737; Mann et al., 1985, J. Virol., 54:401-407), and human origin (Page et al., 1990, J. Virol., 64:5370-5276; Buchschalcher et al., 1992, J. Virol., 66:2731-2739). Most human gene therapy protocols have been based on disabled murine retroviruses.

[0314] Non-viral gene transfer methods known in the art include chemical techniques such as calcium phosphate coprecipitation (Graham et al., 1973, Virology, 52:456-467; Pellicer et al., 1980, Science, 209:1414-1422), mechanical techniques, for example microinjection (Anderson et al., 1980, Proc. Natl. Acad. Sci. USA, 77:5399-5403; Gordon et al., 1980, Proc. Natl. Acad. Sci. USA, 77:7380-7384; Brinster et al., 1981, Cell, 27:223-231; Constantini et al., 1981, Nature, 294:92-94), membrane fusion-mediated transfer via liposomes (Felgner et al., 1987, Proc. Natl. Acad. Sci. USA, 84:7413-7417; Wang et al., 1989, Biochemistry, 28:9508-9514; Kaneda et al., 1989, J. Biol. Chem., 264:12126-12129; Stewart et al., 1992, Hum. Gene Ther. 3:267-275; Nabel et al., 1990, Science, 249:1285-1288; Lim et al., 1992, Circulation, 83:2007-2011; U.S. Pat. Nos. 5,283,185 and 5,795,587), and direct DNA uptake and receptor-mediated DNA transfer (Wolff et al., 1990, Science, 247:1465-1468; Wu et al., 1991, BioTechniques, 11:474-485; Zenke et al., 1990, Proc. Natl. Acad. Sci. USA, 87:3655-3659; Wu et al., 1989, J. Biol. Chem., 264:16985-16987; Wolff et al., 1991, BioTechniques, 11:474-485; Wagner et al., 1991, Proc. Natl. Acad. Sci. USA, 88:4255-4259; Cotten et al., 1990, Proc. Natl. Acad. Sci. USA, 87:4033-4037; Curiel et al., 1991, Proc. Natl. Acad. Sci. USA, 88:8850-8854; Curiel et al., 1991, Hum. Gene Ther. 3:147-154).

[0315] Many types of cells and cell lines (e.g., primary cell lines or established cell lines) and tissues are capable of being stably transfected by or receiving the constructs of the invention. Examples of cells that may be used include, but are not limited to, stem cells, B lymphocytes, T lymphocytes, macrophages, other white blood lymphocytes (e.g., myelocytes, macrophages, or monocytes), immune system cells of different developmental stages, erythroid lineage cells, pancreatic cells, lung cells, muscle cells, liver cells, fat cells, neuronal cells, glial cells, other brain cells, transformed cells of various cell lineages corresponding to normal cell counterparts (e.g., K562, HEL, HL60, and MEL cells), and established or otherwise transformed cells lines derived from all of the foregoing. In addition, the constructs of the present invention may be transferred by various means directly into tissues, where they would stably integrate into the cells comprising the tissues. Further, the constructs containing the DNA sequences of the peptides of the invention can be introduced into primary cells at various stages of development, including the embryonic and fetal stages, so as to effect gene therapy at early stages of development.

[0316] In one approach, plasmid DNA is complexed with a polylysine-conjugated antibody specific to the adenovirus hexon protein, and the resulting complex is bound to an adenovirus vector. The trimolecular complex is then used to infect cells. The adenovirus vector permits efficient binding, internalization, and degradation of the endosome before the coupled DNA is damaged.

[0317] In another approach, liposome/DNA is used to mediate direct in vivo gene transfer. While in standard liposome preparations the gene transfer process is non-specific, localized in vivo uptake and expression have been reported in tumor deposits, for example, following direct in situ administration (Nabel, 1992, Hum. Gene Ther. 3:399-410).

[0318] Suitable gene transfer vectors possess a promoter sequence, preferably a promoter that is cell-specific and placed upstream of the sequence to be expressed. The vectors may also contain, optionally, one or more expressible marker genes for expression as an indication of successful transfection and expression of the nucleic acid sequences contained in the vector. In addition, vectors can be optimized to minimize undesired immunogenicity and maximize long-term expression of the desired gene product(s) (see Nabe, 1999, Proc. Natl. Acad. Sci. USA 96:324-326). Moreover, vectors can be chosen based on cell-type that is targeted for treatment.

[0319] Illustrative examples of vehicles or vector constructs for transfection or infection of the host cells include replication-defective viral vectors, DNA virus or RNA virus (retrovirus) vectors, such as adenovirus, herpes simplex virus and adeno-associated viral vectors. Adeno-associated virus vectors are single stranded and allow the efficient delivery of multiple copies of nucleic acid to the cell's nucleus. Preferred are adenovirus vectors. The vectors will normally be substantially free of any prokaryotic DNA and may comprise a number of different functional nucleic acid sequences. An example of such functional sequences may be a DNA region comprising transcriptional and translational initiation and termination regulatory sequences, including promoters (e.g., strong promoters, inducible promoters, and the like) and enhancers which are active in the host cells. Also included as part of the functional sequences is an open reading frame (polynucleotide sequence) encoding a protein of interest. Flanking sequences may also be included for site-directed integration. In some situations, the 5′-flanking sequence will allow homologous recombination, thus changing the nature of the transcriptional initiation region, so as to provide for inducible or non-inducible transcription to increase or decrease the level of transcription, as an example.

[0320] In general, the encoded and expressed peptide may be intracellular, i.e., retained in the cytoplasm, nucleus, or in an organelle, or may be secreted by the cell. For secretion, a signal sequence may be fused to the peptide sequence. As previously mentioned, a marker may be present for selection of cells containing the vector construct. The marker may be an inducible or non-inducible gene and will generally allow for positive selection under induction, or without induction, respectively. Examples of marker genes include neomycin, dihydrofolate reductase, glutamine synthetase, and the like. The vector employed will generally also include an origin of replication and other genes that are necessary for replication in the host cells, as routinely employed by those having skill in the art. As an example, the replication system comprising the origin of replication and any proteins associated with replication encoded by a particular virus may be included as part of the construct. The replication system must be selected so that the genes encoding products necessary for replication do not ultimately transform the cells. Such replication systems are represented by replication-defective adenovirus (see G. Acsadi et al., 1994, Hum. Mol. Genet. 3:579-584) and by Epstein-Barr virus. Examples of replication defective vectors, particularly, retroviral vectors that are replication defective, are BAG, (see Price et al., 1987, Proc. Natl. Acad. Sci. USA, 84:156; Sanes et al., 1986, EMBO J., 5:3133). It will be understood that the final gene construct may contain one or more genes of interest, for example, a gene encoding a bioactive metabolic molecule. In addition, cDNA, synthetically produced DNA or chromosomal DNA may be employed utilizing methods and protocols known and practiced by those having skill in the art.

[0321] According to one approach for gene therapy, a vector encoding an IR or IGF-1R agonist or antagonist peptide is directly injected into the recipient cells (in vivo gene therapy). Alternatively, cells from the intended recipients are explanted, genetically modified to encode an IR or IGF-1R agonist or antagonist peptide, and reimplanted into the donor (ex vivo gene therapy). An ex vivo approach provides the advantage of efficient viral gene transfer, which is superior to in vivo gene transfer approaches. In accordance with ex vivo gene therapy, the host cells are first transfected with engineered vectors containing at least one gene encoding an IR or IGF-1R agonist or antagonist peptide, suspended in a physiologically acceptable carrier or excipient such as saline or phosphate buffered saline, and the like, and then administered to the host or host cells. The desired gene product is expressed by the injected cells, which thus introduce the gene product into the host. The introduced gene products can thereby be utilized to treat or ameliorate a disorder that is related to altered insulin or IGF-1 levels (e.g., diabetes).

[0322] The described constructs may be administered in the form of a pharmaceutical preparation or composition containing a pharmaceutically acceptable carrier and a physiological excipient, in which preparation the vector may be a viral vector construct, or the like, to target the cells, tissues, or organs of the recipient organism of interest, including human and non-human mammals. The composition may be formed by dispersing the components in a suitable pharmaceutically acceptable liquid or solution such as sterile physiological saline or other injectable aqueous liquids. The amounts of the components to be used in such compositions may be routinely determined by those having skill in the art. The compositions may be administered by parenteral routes of injection, including subcutaneous, intravenous, intramuscular, and intrasternal.

[0323] J. Cancer Therapeutics

[0324] In recent experiments, embryo fibroblasts from IGF-1R knock-out mice have been shown to be highly resistant to transformation by oncogenes such as SV40 T antigen, activated Ha-ras, activated Src, and others (B. Valentinis and R. Baserga, 2001, Mol. Pathol., 54:133-137). This suggested that IGF-1R was required to mediate malignant transformation by these oncogenes. In addition, IGF-1 and IGF-1R have been shown to act as transforming factors in various forms of human cancer (see above). IGF-1 and IGF-2 have also been implicated as factors in the malignant transformation of several tissues. Transgenic mice that express a truncated form of IGF-1 that has a decreased affinity for IGFBPs (des(1-3) IGF-11), show increased incidence of mammary tumors (Hadsell et al., 2000, Oncogene 19:889-898). In addition, mice over-expressing IGF-1I in mammary glands showed increased mammary tumor formation (Bates et al., 1995, Br. J. Cancer 72:1189-1193). Transgenic mice that overexpress IGF-1 in the basal layer of the skin show hyperplasia of the epidermis and increased promotion of spontaneous tumors (DiGiovanni et al., 2000, Cancer Res. 60:1561-1570).

[0325] IGF-1R also appears to cross-talk with other hormone receptors. Considerable evidence suggests that estrogen can act to increase expression of IGF-1R. This is of particular importance in breast cancer, where the expression of IGF-1R correlates with expression of the estrogen receptor (ER). IGF-1R expression is higher in tumors from ER positive patients. Accordingly, IGF-1R expression could be used as a prognostic marker for breast cancer patients. In addition, high levels of IRS-1, a key intermediate in the IGF-1R signal transduction cascade, correlates with tumor size and shorter disease-free survival in patients with ER positive tumors (D. Sachdev and D. Yee, 2001, Endocr. Relat. Cancer 8:197-209). In addition, treatment with anti-estrogens has been shown to decrease the expression of IGF-1R and IRS-1 (Chan et al., 2001, Clin. Cancer Res. 7:2545-2554). Thus, the cross-talk between IGF-1R and ER may be complex. Yet, it is clear that IGF-signaling promotes malignant transformation in mammary glands. Interestingly, ER positive MCF-7 cells treated with IGF-1 show a sustained activation of the PI3K-Akt pathway and protection against apoptosis induced by serum deprivation. In contrast, ER negative MDA-MB 231 cells show only a transient activation of PI3K-Akt pathway (Bartucci et al., 2001, Cancer Res. 61:6747-6754).

[0326] Studies have also revealed a connection between IGF-1R-mediated signaling and epidermal growth factor (EGF)-induced signaling through ErbB-receptors. IGF-1R and ErbB-2 (Neu/Her2) have been observed to form hetero-oligomers induced by stimulation with heregulin or IGF-1 (Balana et al., 2001, Oncogene, 19:34-47, 2001). In glioblastomas, resistance to a chemical inhibitor of the ErbB receptor tyrosine kinase has been correlated with increased IGF-1R expression and constitutive PI3K signaling (Chakravarti et al., 2002, Cancer Res. 62:200-207). In breast cancer cell lines over expressing ErbB-2, increased IGF-1R signaling was observed in the presence of the anti-ErbB-2 receptor monoclonal antibody Herceptin®/trastuzumab (Lu et al., 2001, J. Natl. Cancer Inst. 93:1852-1857).

[0327] Modulation of IGF-signaling in various malignant cells has provided further evidence for the involvement of the IGF-1R in cancer. Abrogation of IGF-1R expression by antisense RNA reversed the transformed phenotype in cervical cancer cells. Antisense to IGF-1R also inhibited glioblastoma and melanoma xenografts in nude mice (Resnicoff et al., 1994, Cancer Res. 54:4848-4850; Resnicoff et al., 1994, Cancer Res. 54:2218-2222; Nakamura et al., 2000, Cancer Res. 60:760-765, 2000). Experiments have also indicated that IGF-1R is involved in the development and maintenance of metastatic phenotypes. In particular, high expression of a dominant negative mutant of IGF-1R (486stop) in ER positive breast cancer cells has been shown to inhibit adhesion, invasion, and metastasis of the cells (Dunn et al., 1998, Cancer Res. 58:3353-3361). Moreover, lung carcinoma cells exhibited an enhanced metastatic phenotype following overexpression of IGF-1R (Long et al., 1998, Exp. Cell Res. 238:116-121). In addition, activation of IGF-1R has been shown to block apoptotic pathways. Apoptosis in mammary glands was inhibited in IGF-1 transgenic mice (Hadsell et al., 2000, Oncogene 19:889-898). Moreover, down-regulation of IGF-1R function, either by antisense strategies or dominant negative mutants, caused massive apoptosis of tumor cells in vitro and in vivo. IGF-1 has also been shown to inhibit apoptosis associated with transformation by the c-myc oncogene and apoptosis induced by chemotherapeutic agents. The anti-apoptotic signaling of IGF-1 has been attributed to the PI3K-Akt pathway, although other pathways may mediate similar effects (Butt et al., 1999, Immunol. Cell Biol. 77:256-262; B. Valentinis and R. Baserga, 2001, Mol. Pathol. 54:133-137).

[0328] The sum of these observations indicate the importance of identifying antagonists or inhibitors of IGF-1 and/or IGF-1R. Attempts have been made to develop clinically relevant inhibitors of IGF-1R using monoclonal antibodies, antisense strategies, and peptide fragments derived from the natural ligand (Dunn et al., 1998, Cancer Res. 58:3353-3361; Z. Pietrzkowski et al., 1992, Cancer Res. 52:6447-6451; Z. Pietrzkowski et al., 1993, Cancer Res. 53:1102-1106; Rubini et al., 1999, Exp. Cell Res. 251:22-32). Using an alternate approach, this invention provides methods, kits, and compositions (e.g., pharmaceutical compositions) comprising IGF-1R antagonist peptides, or small molecule mimetics thereof, that can be useful in the diagnosis, treatment, and monitoring of one or more cancers. In some cases, the compositions, methods, and kits of the invention can also be used to determine the prognosis of a IGF-related medical condition (e.g., cancer). Advantageously, certain IGF-1R antagonist peptides disclosed herein are specific for Site 1 or Site 2 of the IGF-1 receptor.

[0329] In accordance with the invention, non-limiting cancer types include carcinoma, sarcoma, myeloma, leukemia, and lymphoma, and mixed types of cancers, such as adenosquamous carcinoma, mixed mesodermal tumor, carcinosarcoma, and teratocarcinoma. Representative cancers include, but are not limited to, bladder cancer, lung cancer, breast cancer, colon cancer, rectal cancer, endometrial cancer, ovarian cancer, head and neck cancer, prostate cancer, and melanoma. Specifically included are AIDS-related cancers (e.g., Kaposi's Sarcoma, AIDS-related lymphoma), bone cancers (e.g., osteosarcoma, malignant fibrous histiocytoma of bone, Ewing's Sarcoma, and related cancers), and hematologic/blood cancers (e.g., adult acute lymphoblastic leukemia, childhood acute lymphoblastic leukemia, adult acute myeloid leukemia, childhood acute myeloid leukemia, chronic lymphocytic leukemia, chronic myelogenous leukemia, hairy cell leukemia, cutaneous T-cell lymphoma, adult Hodgkin's disease, childhood Hodgkin's disease, Hodgkin's disease during pregnancy, mycosis fungoides, adult non-Hodgkin's lymphoma, childhood non-Hodgkin's lymphoma, non-Hodgkin's lymphoma during pregnancy, primary central nervous system lymphoma, Sezary syndrome, cutaneous T-cell lymphoma, Waldenström's macroglobulinemia, multiple myeloma/plasma cell neoplasm, myelodysplastic syndrome, and myeloproliferative disorders).

[0330] Also included are brain cancers (e.g., adult brain tumor, childhood brain stem glioma, childhood cerebellar astrocytoma, childhood cerebral astrocytoma, childhood ependymoma, childhood medulloblastoma, supratentorial primitive neuroectodermal and pineal, and childhood visual pathway and hypothalamic glioma), digestive/gastrointestinal cancers (e.g., anal cancer, extrahepatic bile duct cancer, gastrointestinal carcinoid tumor, colon cancer, esophageal cancer, gallbladder cancer, adult primary liver cancer, childhood liver cancer, pancreatic cancer, rectal cancer, small intestine cancer, and gastric cancer), musculoskeletal cancers (e.g., childhood rhabdomyosarcoma, adult soft tissue sarcoma, childhood soft tissue sarcoma, and uterine sarcoma), and endocrine cancers (e.g., adrenocortical carcinoma, gastrointestinal carcinoid tumor, islet cell carcinoma (endocrine pancreas), parathyroid cancer, pheochromocytoma, pituitary tumor, and thyroid cancer).

[0331] Further included are neurologic cancers (e.g., neuroblastoma, pituitary tumor, and primary central nervous system lymphoma), eye cancers (e.g., intraocular melanoma and retinoblastoma), genitourinary cancers (e.g., bladder cancer, kidney (renal cell) cancer, penile cancer, transitional cell renal pelvis and ureter cancer, testicular cancer, urethral cancer, Wilms' tumor and other childhood kidney tumors), respiratory/thoracic cancers (e.g., non-small cell lung cancer, small cell lung cancer, malignant mesothelioma, and malignant thymoma), germ cell cancers (e.g., childhood extracranial germ cell tumor and extragonadal germ cell tumor), skin cancers (e.g., melanoma, and merkel cell carcinoma), gynecologic cancers (e.g., cervical cancer, endometrial cancer, gestational trophoblastic tumor, ovarian epithelial cancer, ovarian germ cell tumor, ovarian low malignant potential tumor, uterine sarcoma, vaginal cancer, and vulvar cancer), and unknown primary cancers.

[0332] Specific breast cancers include, but are not limited to, non-invasive cancers, such as ductal carcinoma in situ (DCIS), intraductal carcinoma lobular carcinoma in situ (LCIS), papillary carcinoma, and comedocarcinoma, or invasive cancers, such as adenocarcinomas, or carcinomas, e.g., infiltrating ductal carcinoma, infiltrating lobular carcinoma, infiltrating ductal and lobular carcinoma, medullary carcinoma, mucinous (colloid) carcinoma, comedocarcinoma, Paget's Disease, papillary carcinoma, tubular carcinoma, and inflammatory carcinoma. Specific prostate cancers may include adenocarcinomas and sarcomas, or pre-cancerous conditions, such as prostate intraepithelial neoplasia (PIN). Specific lung cancers include those relating to tumors such as bronchial carcinoid (bronchial adenoma), chondromatous hamartoma (benign), solitary lymphoma, and sarcoma (malignant) tumors, as well as lung cancers relating to multifocal lymphomas. Bronchogenic carcinomas may present as squamous cell carcinomas, small cell carcinomas, non-small cell carcinomas, or adenocarcinomas.

[0333] The IGF-1R antagonist peptides of the invention may be administered individually, or in combination with other IGF-1 or IGF-1R antagonists or inhibitors. Alternatively, the disclosed IGF-1R antagonist peptides can be used in combination with other cancer therapies, e.g., surgery, radiation, biological response modification, immunotherapy, hormone therapy, and/or chemotherapy. For prostate cancers, non-limiting examples of chemotherapeutic agents include docetaxel, paclitaxel, estramustine, etoposide, vinblastine, mitoxantrone, and paclitaxel. For breast cancers, non-limiting examples of chemotherapeutic and biological agents include cyclophosphamide, methotrexate, 5-fluorouracil, doxorubicin, tamoxifen, paclitaxel, docetaxel, navelbine, capecitabine, mitomycin C, Interferons, interleukin-2, lymphocyte-activated killer cells, tumor necrosis factors, and monoclonal antibodies (e.g., mAb to HER-2/neu receptor (trastuzumab) Herceptin®). For lung cancers, non-limiting examples of chemotherapeutic and biological agents include, but are not limited to, platinum compounds (e.g., cisplatin or carboplatin), vinca alkaloids (e.g., vinorelbine, vincristine, or vinblastine), taxines (e.g., docetaxel or paclitaxel), and various topoisomerase inhibitors.

### EXAMPLES

[0334] The examples as set forth herein are meant to exemplify the various aspects of the present invention and are not intended to limit the invention in any way.

[0335] The following materials were used in the examples described below. Soluble IGF-1R was obtained from R&D Systems (Minneapolis, Minn.; Cat. # 391-GR/CF). Insulin receptor was prepared according to Bass et al., 1996. The insulin was either from Sigma (St. Louis, Mo.; Cat. # 1-0259) or Boehringer. The IGF-1 was from PeproTech (Cat. # 100-11). All synthetic peptides were synthesized by Novo Nordisk, AnaSpec, Inc. (San Jose, Calif.), PeptioGenics (Livermore, Calif.), or Research Genetics (Huntsville, Ala.) at >80% purity. The Maxisorb Plates were from NUNC via Fisher (Cat. # 12565347). The HRP/Anti-M13 conjugate was from Pharmacia (Cat. # 27-9421-01). The ABTS solution was from BioF/X (Cat. # ABTS-0100-04).

### Example 1

### Monomer and Dimer Peptides

[0336] A. Cloning

[0337] Monomer and dimer peptides were constructed and expressed as protein fusions to a chitin binding domain (CBD) using the pTYB2 vector from the IMPACT™-CN system (New England Biolabs (NEB), Beverly, Mass.). The pTYB2 vector encodes a protein-splicing element (termed intein), which initiates self-cleavage upon the addition of DTT. The intein self-cleavage separates the dimer from the affinity tag, to allow purification.

[0338] In the pTYB2 construct, the C-terminus of the peptide sequence was fused to the N-terminus of the intein/CBD sequence. Two peptide-flanking epitope tags were included: a shortened-FLAG® at the N-terminus and E-Tag at the C-terminus. This fusion was generated by ligating a vector fragment encoding the intein/CBD with a PCR product encoding the peptide of interest.

[0339] The vector fragment was obtained by digesting at appropriate restriction sites the pTBY2 vector. The digested DNA fragment was resolved on a 1% agarose gel, excised, and purified by QIAEXII (QIAGEN, Valencia, Calif.). To obtain the PCR product of the target proteins, primers were synthesized which anneal to appropriate sequences. The vector and insert were ligated overnight at 15° C. The ligation product was purified using QIAquick spin columns (QIAGEN) and electroporations were performed at 1500 V in an electroporation cuvette (0.1 mm gap; 0.5 ml volume) containing 10 ng of DNA and 40 μl of E. coli strain BL21.

[0340] Immediately following electroporation, 1 ml of pre-warmed (40° C.) 2xYT medium containing 2% glucose (2xYT-G) was added to the transformants. The transformants were grown at 37° C. for 1 h, and then plated onto 2xYT-AG plates and incubated overnight at 37° C. Individual colonies were isolated and used to innoculate 2xYT-G. The cultures were grown overnight at 37° C. Plasmid DNA was isolated from the cultures and sequencing was performed to confirm that the correct construct was obtained.

[0341] B. Small-Scale Expression of Peptide-CBD Fusion Proteins

[0342] E. coli ER2566 (New England Biolabs) containing plasmids encoding peptide-CBD fusion proteins were grown in 2xYT-AG at 37° C. overnight, with agitation (250 rpm). The following day, the cultures were used to inoculate media (2x YT-G) to obtain an OD₆₀₀ of 0.1. Upon reaching an OD₆₀₀ of 0.6, expression of the fusion protein was induced by the addition of IPTG (isopropyl-β-D-thiogalactopyranoside) to a final concentration of 0.3 mM. Cells were grown for 3 h. Following this, cells were pelleted by centrifugation and the cell pellets were analyzed by SDS-PAGE electrophoresis. Production of the correct molecular weight fusion proteins was confirmed by Western blot analysis using the monoclonal antibody anti-E-Tag-HRP conjugate (Amersham Pharmacia).

[0343] C. Large-Scale Expression and Purification of Soluble Peptide-CBD Fusion Proteins

[0344] E. coli ER2566 carrying plasmids encoding the fusion proteins were grown in 2xYT-AG media at 37° C. for 8 h, with agitation (250 rpm). The cultures were back-diluted into to 2 L volumes of 2xYT-A to achieve an OD₆₀₀ of 0.1. Upon reaching an OD₆₀₀ of 0.5, IPTG was added to a final concentration of 0.3 mM. Cells were grown at 30° C. overnight. The next day cells were isolated by centrifugation. Samples of the cell pellet were analyzed by SDS-PAGE followed by the Western blot analysis using the mouse monoclonal antibody anti-E-Tag-HRP conjugate (Pharmacia) to visualize the expressed product.

[0345] D. Purification

[0346] The cell pellets were disrupted mechanically by sonication or chemically by treatment with the mild detergent. After removal of cell debris by centrifugation, the soluble proteins in the clarified lysate were prepared for chromatographic purification by dilution or dialysis into the appropriate starting buffer. The CBD fusions were purified by chitin affinity chromatography according to the manufacturer's instructions (New England Biolabs). The lysate was loaded onto a chitin affinity column and the column was washed with 10 volumes of column buffer. Three bed volumes of the DTT containing cleavage buffer were loaded onto the column and the column was incubated overnight. The next day, the target protein was eluted by continuing the flow of the cleavage buffer without DTT. The purified proteins were analyzed for purity and integrity by SDS-PAGE and Western blot analysis according to standard protocols.

### Example 2

### PEG-Based Dimer Peptides

[0347] A. Synthesis of the Aldehyde Containing Peptide

[0348] The peptide was synthesized by stepwise solid phase synthesis on Rink amide Tentagel (0.21 mmol/g). Three equivalents of Fmoc-amino acids were used. The serine residue was introduced into the peptide by either coupling Fmoc-Ser(tBu)-OH to the N-terminal peptide or coupling Boc-Ser(tBu) to a selectively protected lysine side-chain. The peptide was then deprotected and cleaved from the resin by treatment with 95% TFA (trifluoroacetic acid; aq) containing TIS (triisopropylsilan). Periodate oxidation, using 2 equivalent of NalO₄ in 20% DMSO (dimethyl sulfoxide)-80% phosphate buffer pH 7.5 (45 μl/μmol peptide) for 5 min at room temperature (RT), converted the 2-amino alcohol moiety in an α-oxoacyl group. The peptide was purified immediately following oxidation.

[0349] B. Synthesis of the PEG-Based Dimer

[0350] The unprotected and oxidized peptide (4.2 equivalent) was dimerized on the dioxyamino-PEG (polyethylene glycol)-linker (1 equivalent) in 90% DMSO-10% 20 mM NaOAc buffer, pH 5.1 (4.2 μl/μmol peptide). The solution was left for 1 h at 38° C. and the progress of the reaction was monitored by MALDI-MS (matrix-assisted laser desorption/ionization mass spectrometry). Following this, the crude dimer was purified by semi-preparative HPLC (high performance liquid chromatography).

[0351] The molecular weights and inter peptide distance of various linkers is shown in Table 3, below.

TABLE 3

| Structure | Number | MW | MW (-2H₂O) |
|---|---|---|---|
| [chemical structure] | 1 | 100.1 | 64.1 |
| [chemical structure] | 2 | 58.04 | 22.04 |
| [chemical structure] | 3 | 149.15 | 113.15 |
| [chemical structure] | 4 | 150.14 | 114.14 |
| [chemical structure] | 5 | 134.13 | 98.13 |
| [chemical structure] | 6 | 134.13 | 98.13 |
| [chemical structure] | 7 | 134.13 | 98.13 |
| [chemical structure] | 8 | 234.25 | 198.25 |
| [chemical structure] | 9 | 302.3 | 266.3 |
| [chemical structure] | 10 | 72.06 | 36.06 |
| [chemical structure] | 11 | 86.09 | 50.09 |
| [chemical structure] | 12 | 114.14 | 78.14 |
| [chemical structure] | 13 | 128.08 | 92.08 |
| [chemical structure] | 14 | 142.19 | 106.19 |
| (HCO)4-(Lys)2-Lys- | 15 | | |
| Gly-NH₂ | | | |
| [chemical structure] | 16 | 136.2 | 100.2 |
| [chemical structure] | 17 | 180.2 | 144.2 |
| [chemical structure] | 18 | 224.3 | 188.3 |
| [chemical structure] | 19 | 268.3 | 232.3 |
| [chemical structure] | 20 | 312.4 | 276.4 |
| [chemical structure] | 21 | 278.4 | 242.4 |
| [chemical structure] | 22 | 240.3 | 204.3 |
| [chemical structure] | 23 | 240.3 | 204.3 |
| [chemical structure] | 24 | 210.2 | 192.2 |

### Example 3

### Determination of Insulin Receptor Binding

[0352] IR was incubated with ¹²⁵I-labeled insulin at various concentrations of test substance and the K_{d} was calculated. According to this method, human insulin receptor (HIR) or human IGF-1 receptor (HIGF-1R) was purified from transfected cells after solubilization with Triton X-100. The assay buffer contained 100 mM HEPES (pH 7.8), 100 mM NaCl, 10 mM MgCl₂, 0.5% human serum albumin (HSA), 0.2% gammaglobulin and 0.025% Triton X-100. The receptor concentration was chosen to give 30-60% binding of 2000 cpm (3 pM) of its ¹²⁵I-labeled ligand (TyrA14-¹²⁵I-HI or Tyr31-¹²⁵I-IGF1) and a dilution series of the substance to be tested was added. After equilibration for 2 days at 4° C., each sample (200 μl) was precipitated by addition of 400 μl 25% PEG 6000, centrifuged, washed with 1 ml 15% PEG 6000, and counted in a gamma-counter.

[0353] The insulin/IGF-1 competition curve was fitted to a one-site binding model and the calculated parameters for receptor concentration, insulin affinity, and non-specific binding were used in calculating the binding constants of the test substances. Representative curves for insulin competition are shown in FIGS. 10A-10C; 11A-11D. Qualitative data are provided in Table 4, below.

[0354] Table 4 illustrates IR affinities for the RP9 monomer peptide and various RP9 monomer truncations. The results demonstrate that RP9 N-terminal sequence (GSLD; SEQ ID NO:1785) and C-terminal sequence (LGKK; SEQ ID NO:1786) can be deleted without substantially affecting HIR binding affinity (Table 4).

TABLE 4

| | SEQ | | | | |
|---|---|---|---|---|---|
| | ID | | Site | | HIR |
| Peptide | NO: | Formula | IR | Sequence | Kd (mol/l) |
| S386 | 1559 | 1 | 1 | GSLDESFYDWFERQLG | 3.2 * 10⁻⁷ |
| S395 | 1787 | 1 | 1 | GSLDESFYDWFERQL | 9.1 * 10⁻⁸ |
| S394 | 1788 | 1 | 1 | GSLDESFYDWFERQ | 8.1 * 10⁻⁸ |
| S396 | 1789 | 1 | 1 | GSLDESFYDWFER | >2 * 10⁻⁵ |
| S399 | 1790 | 1 | 1 | ESFYDWFERQL | 9.1 * 10⁻⁸ |
| S400 | 1791 | 1 | 1 | ESFYDWFERQ | 6.3 * 10⁻⁷ |

[0355] FIGS. 10A-10C demonstrate that Site 1-Site 2 heterodimer peptides 537, 538, and 539 bound to IR with substantially higher (several orders of magnitude) affinity than corresponding monomer (D117 and 540) and homodimer (521 and 535) peptides. FIGS. 11A-11D demonstrate that Site 1-Site 2 heterodimer peptides, 537 and 538, bound to IR with markedly higher affinity than the monomer peptide D117.

### Example 4

### Adipocyte Assay for Determination of Insulin Agonist Activity

[0356] Insulin increases uptake of ³H glucose into adipocytes and its conversion into lipid. Incorporation of ³H into the lipid phase was determined by partitioning of lipid phase into a scintillant mixture, which excludes water-soluble ³H products. The effect of compounds on the incorporation of ³H glucose at a sub-maximal insulin dose was determined, and the results expressed as increase relative to full insulin response. The method was adapted from Moody et al., 1974, Horm. Metab. Res. 6(1):12-6.

[0357] Mouse epididymal fat pads were dissected out, minced into digestion buffer (Krebs-Ringer 25 mM HEPES, 4% HSA, 1.1 mM glucose, 0.4 mg/ml Collagenase Type 1, pH 7.4), and digested for up to 1.5 h at 36.5° C. After filtration, washing (Krebs-Ringer HEPES, 1% HSA), and resuspension in assay buffer (Krebs-Ringer HEPES, 1% HSA), free fat cells were pipetted into 96-well Picoplates (Packard), containing test solution and approximately an ED₂₀ insulin.

[0358] The assay was started by addition of ³H glucose (Amersham TRK 239), in a final concentration of 0.45 mM glucose. The assay was incubated for 2 h, 36.5° C., in a Labshaker incubation tower, 400 rpm, then terminated by the addition of Permablend/Toluene scintillant (or equivalent), and the plates sealed, before standing for at least 1 h and detection in a Packard Top Counter or equivalent. A full insulin standard curve (8 dose) was run as control on each plate.

[0359] Data are presented graphically, as effect of compound on an (approximate) ED₂₀ insulin response, with data normalized to a full insulin response. The assay can also be run at basal or maximal insulin concentration. Representative dose-response curves for insulin and IGF-1 are shown in FIGS. 12-18. Qualitative data are shown in Tables 5-7.

[0360] In free fat cell (FFC) assays, truncated synthetic RP9 monomer peptides S390 and S394 showed potency similar to full-length RP9 monomer peptides (FIGS. 12A-12D). Truncated synthetic RP9 homodimer peptides S415 and S417 were highly potent in FFC assays, but less potent than full-length RP9 homodimer peptides (FIGS. 13A-13C; compare to peptides 521 and 535, described below). The potency of recombinant RP9 homodimer peptides 521 and 535 in FFC assays is shown in FIGS. 14A-14C. The curves are flattened, suggesting that the binding mechanism may not be mediated by simple intramolecular binding (FIGS. 14A-14C).

[0361] Results further indicated that synthetic RP9 homodimer peptides S337 and S374 showed increased HIR biding affinity and increased potency in FFC assays compared to synthetic RP9 monomer, S371 (Table 5). Similarly, synthetic RP9 homodimer peptides S314 and S317 showed increased HIR binding affinity and increased potency in FFC assays compared to synthetic RP9 monomer, S371, and various RP9 truncations (Table 6).

TABLE 5

| | SEQ | | | | | | |
|---|---|---|---|---|---|---|---|
| | ID | | Site | Monomer | | HIR k_{d} | |
| Pep. | NO: | Formula | IR | or Dimer | Sequence | (mol/l) | FFC |
| S371 | 1558 | 1 | 1 | M (RP9) | GSLDESFYDWFERQLGKK | 6.3.*10⁻⁷ | + |
| S337 | 1792 | 1-1 | 1-1 | D, C-Term 23 | (GSLDESFYDWFERQLGKK-Lig)₂-23 | 1.1*10⁻⁸ | +++++ |
| S374 | 1793 | 1-1 | 1-1 | D, N-Term 17 | 17-(GSLDESFYDWFERQLGKK)₂₂ | 1.8*10⁻⁷ | ++++ |

M = monomer;
D = dimer;
C-Term = C-terminal linker (C-C);
N-Term = N-terminal linker (N-N);
23 and 17 represent specific chemical linkers (see Table 3);
For FEC: 0 is no effect, + is agonist, − is antagonist.

TABLE 6

| | SEQ | | | | | | |
|---|---|---|---|---|---|---|---|
| | ID | | Site | Mon. or | | HIR K_{d} | |
| Peptide | NO: | Form. | IR | Dimer | Sequence | (mol/l) | FFC |
| S371 | 1558 | 1 | 1 | M | GSLDESFYDWFERQLGKK | 6.3*10⁻⁷ | + |
| (RP9) | | | | | | | |
| S395 | 1787 | 1 | 1 | M | GSLDESFYDWFERQL | 9.1*10⁻⁸ | + |
| S394 | 1788 | 1 | 1 | M | GSLDESFYDWFERQ | 8.1*10⁻⁸ | ++ |
| S396 | 1789 | 1 | 1 | M | GSLDESFYDWFER | >2*10⁻⁵ | 0 |
| S390 | 1794 | 1 | 1 | M | ESFYDWFERQLG | 6.2*10⁻⁷ | + |
| S399 | 1790 | 1 | 1 | M | ESFYDWFERQL | 9.1*10⁻⁸ | ++ |
| S400 | 1791 | 1 | 1 | M | ESFYDWFERQ | 6.3*10⁻⁷ | 0 |
| S415 | 1795 | 1-1 | 1-1 | D; C-Term | (ESFYDWFERQLGK)₂-23 | 1.0*10⁻⁷ | ++++ |
| S417 | 1796 | 1-1 | 1-1 | D; N-Term | 23-(ESFYDWFERQLG)₂ | 9.2*10⁻⁷ | +++ |

M = monomer;
D = dimer;
C-Term = C-terminal linker (C-C);
N-Term = N-terminal linker (N-N);
23 represents a specific chemical linker (see Table 3);
For FEC: 0 is no effect, + is agonist, − is antagonist;
Form. = formula;
Mon. = monomer;

[0362] Site 1-Site 2 dimer peptides 537 and 538 were inactive in the FFC assays using the standard concentration of insulin (FIGS. 15A-15C). However, Site 1-Site 2 dimer peptides 537 and 538 were antagonists in the FFC assay in the presence of a stimulating concentration of insulin (FIGS. 16A-16C). In contrast, Site 2-Site 1 dimer peptide 539 was a full agonist in the FFC assay, with a slope similar to that of insulin (FIGS. 17A-17B).

[0363] Additional experiments confirmed that FFC assay activity of Site 1-Site 2 dimer peptides was affected by the orientation of the monomer subunits (FIGS. 18A-18D). In particular, dimer peptides comprising Site 1 (S372 or S373) and Site 2 (S451 or S452) monomer subunits exhibited antagonist activity in the Site 1-Site 2 orientation (C-N linkage) (dimer peptide S453); moderate levels of agonist activity in the Site 1-Site 2 orientation (N-N or C-C linkage) (dimer peptides S454 and S456); and high levels of agonist activity in the Site 2-Site 1 orientation (C-N linkage) (dimer peptide S455) (FIGS. 18A-18D).

[0364] Table 7, below, shows the HIR binding affinity and FFC assay potency of various synthetic peptides, including Site 1-Site 1 dimer peptides S325, S329, S332; S333, S334, S335, S336, S337, S349, S350, S351, S352, S353, S354, S361, S362, S363, S374, S375, S376, S378, S379, S380, S381, S414, S415, S416, S417, S418, S420, and S424. These synthetic dimer peptides exhibited properties comparable to dimer peptides 521 and 535, regardless of the orientation of the monomer subunits. In particular, synthetic Site 1-Site 2 dimer peptides S425, S453, and S459 exhibited antagonist properties comparable to those of the Site 1-Site 2 dimer peptides 537 and 538. Synthetic Site 1-Site 2 dimer peptides S455, S457, and S458 exhibited agonist properties comparable to the dimer peptide 539. Synthetic Site 1-Site 2 dimer peptides S436, S437, S438, S454, S456 act as partial agonists in the FFC assay (i.e., the peptides exhibit a maximal response of less than 100% that of insulin), which is shown in the table as “++” and “+++”.

[0365] Table 7 also shows properties of truncated monomer and dimer peptides, and thereby indicates which N- or C-terminal residues can be deleted without substantial loss of HIR binding affinity (e.g., see synthetic peptides S386 through S392, S394 through S403, and S436 through S445). Notably, certain Site 2-Site 1 dimers show IR affinities of 2*10⁻¹¹ (see, e.g., S519 and S520). These peptides are also very potent in the fat cell assay (FIGS. 31A-31B) and even more potent in the HIR kinase assay (FIGS. 32A-32B) (kinase assay described below).

TABLE 7

| | | | | Site | | | |
|---|---|---|---|---|---|---|---|
| Peptide | SEQ ID NO: | Formula | Linkage | IR | Sequence | HIR K_{d} | FEC |
| S105 | 1797 | F1 | − | 1 | FHENFYDWFVRQVAKK | 3.1*10⁻⁷ | ++ |
| S106 | 1798 | F1 | − | 1 | FHENFYDWFVRQASKK | 4.2*10⁻⁷ | ++ |
| S107 | 1799 | F1 | − | 1 | FHENFYDWFVRAVSKK | 10.0*10⁻⁷ | + |
| S108 | 1800 | F1 | − | 1 | FHENFYDWFVAQVSKK | 75*10⁻⁷ | + |
| S109 | 1801 | F1 | − | 1 | FHENFYDWFARQVSKK | 2.3*10⁻⁷ | ++ |
| S110 | 1802 | F1 | − | 1 | FHEAFYDWFVRQVSKK | 2.2*10⁻⁷ | ++ |
| S111 | 1803 | F1 | − | 1 | FHANFYDWFVRQVSKK | 33*10⁻⁷ | 0 |
| S112 | 1804 | F1 | − | 1 | FAENFYDWFVRQVSKK | 6.1*10⁻⁷ | + |
| S113 | 1805 | F1 | − | 1 | AHENFYDWFVRQVSKK | 59*10⁻⁷ | + |
| S114 | 1556 | F1 | − | | fhenfydwfvrqvskk | 8.3*10⁻⁶ | 0 |
| S115 | 1806 | F1 | − | 1 | EFHENFYDWFVRQVSEE | 6.5*10⁻⁷ | + |
| S116 | 1807 | F1 | − | 1 | FHENFYGWFVRQVSKK | 1.4*10⁻⁶ | ++ |
| S117 | 1808 | F2 | − | 1 | HETFYSMIRSLAK | 2.7*10⁻⁶ | 0 |
| S118 | 1809 | F2 | − | 1 | SDGEYNAIELLS | 2.4*10⁻⁶ | + |
| S119 | 1810 | F2 | − | 1 | SLNFYDALQLLAKK | 1.8*10⁻⁶ | 0 |
| S120 | 1811 | F2 | − | 1 | HDPFYSMMKSLLK | 2.0*10⁻⁶ | 0 |
| S121 | 1812 | F2 | − | 1 | NSFYEALRMLSSK | 3.1*10⁻⁶ | 0 |
| S122 | 1813 | F7 | − | | HPTSKEIYAKLLK | 93*10⁻⁶ | 0 |
| S123 | 1814 | F7 | − | | HPSTNQMLMKLFK | 1.6*10⁻⁵ | 0 |
| S124 | 1815 | F7 | − | | HPPLSELKLFLIKK | 2.3*10⁻⁵ | 0 |
| S127 | 1816 | F2 | | 1 | WSDFYSYFQGLD | 1.2*10⁻⁶ | 0 |
| S128 | 1817 and 1818 | F1-F1 | C-C | 1-1 | (FHENFYDWFVRQVSKK)₂-Dap | 1.1*10⁻⁶ | ++ |
| S129 | 1819 | F2 | − | 1 | SSNFYQALMLLS | 2.9*10⁻⁶ | 0 |
| S131 | 1820 | F1 | − | 1 | FHENFYDWFVRQVSKK-Lig | 1.2*10⁻⁶ | + |
| S137 | 1821 | F1 | − | 1 | HENFYGWFVRQVSKK | 77*10⁻⁷ | 0 |
| S145 | 1822 and 1823 | F1-F1 | C-C | 1-1 | (FHENFYDWFVRQVSKK)₂-Lys | 1.5*10⁻⁶ | ++ |
| S158 | 1780 | F1 | − | 1 | FHENFYDWFVRQVSK | 8.1*10⁻⁷ | + |
| S165 | 1554 | F1 | − | 1 | FYDWF | >2*10⁻⁵ | 0 |
| S166 | 1824 | F1 | − | 1 | FYDWFKK | >2*10⁻⁵ | 0 |
| S167 | 1825 | F1 | − | 1 | AFYDWFAKK | >2*10⁻⁵ | 31 |
| S168 | 1826 | F1 | − | 1 | AAAAFYDWFMAAAKK | 3.8*10⁻⁶ | 0 |
| S169 | 1827 and 1828 | F1-F1 | N-N | 1-1 | 12-(Lig-FHENFYDWFVRQVSKK)₂ | 5.8*10⁻⁷ | ++ |
| S170 | 1829 and 1830 | F1-F1 | N-N | 1-1 | (CGFHENFYDWFVRQVSKK)₂ | 7.0*10⁻⁷ | +++ |
| | | | | | (linked at cysteines) | | |
| S171 | 1831 | F1 | − | 1 | CGFHENFYDWFVRQVSKK | 2.9*10⁻⁶ | +++ |
| S172 | 1832 and 1833 | F1-F1 | N-N | 1-1 | 14-(Lig-FHENFYDWFVRQVSKK)₂ | 4.8*10⁻⁶ | +++ |
| S173 | 1834 | F3 | − | 1 | LDALDRLMRYFEERPSL | 1.2*10⁻⁶ | 0 |
| S174 | 1835 | F3 | − | 1 | PLAELWAYFEHSEQGRSSAH | 1.6*10⁻⁵ | 0 |
| S175 | 1560 | F1 | − | 1 | GRVDWLQRNANFYDWFVAELG | 2.3*10⁻⁷ | +++ |
| S176 | 1836 | F1 | − | 1 | NGVERAGTGDNFYDWFVAQLH | 4.7*10⁻⁷ | + |
| S177 | 1837 | F2 | − | 1 | EHWNTVDPFYFTLFEWLRESG | 2.7*10⁻⁶ | 0 |
| S178 | 1838 | F2 | − | 1 | EHWNTVDPFYQYFSELLRESG | 1.3*10⁻⁷ | ++ |
| S179 | 1839 | F1 | − | 1 | QSDSGTVHDRFYGWFRDTWAS | 5.4*10⁻⁷ | + |
| S180 | 1840 | F1 | − | 1 | AFYDWFAK | >2*10⁻⁵ | 0 |
| S181 | 1841 | F1 | − | 1 | AFYDWFA | >2*10⁻⁵ | 0 |
| S182 | 1842 | F1 | − | 1 | AFYDWF | >2*10⁻⁵ | 0 |
| S183 | 1843 | F1 | − | 1 | FYDWFA | >2*10⁻⁵ | 0 |
| S184 | 1844 | F1 | − | 1 | Ac-FYDWF | >2*10⁻⁵ | 0 |
| S214 | 1845 | F1 | − | 1 | AFYEWFAKK | >2*10⁻⁵ | 0 |
| S215 | 1846 | F1 | − | 1 | AFYGWFAKK | >2*10⁻⁵ | 0 |
| S216 | 1847 | F1 | − | 1 | AFYKWFAKK | >2*10⁻⁵ | 0 |
| S217 | 1848 and 1849 | F2-F2 | C-C | 1-1 | (SDGFYNAIELLS-Lig)₂-14 | 39*10⁻⁸ | ++ |
| S218 | 1850 and 1851 | F1-F1 | C-C | 1-1 | (AFYDWFAKK-Lig)₂-14 | 1.1*10⁻⁵ | 0 |
| S219 | 1852 | F1 | − | 1 | FHENAYDWFVRQVSKK | >2*10⁻⁵ | 0 |
| S220 | 1853 | F1 | − | 1 | FHENFADWFVRQVSKK | >2*10⁻⁵ | 0 |
| S221 | 1854 | F1 | − | 1 | FHENFYAWFVRQVSKK | 1.1*10⁻⁶ | + |
| S222 | 1855 | F1 | − | 1 | FHENFYDAFVRQVSKK | >2*10⁻⁵ | 0 |
| S223 | 1856 | F1 | − | 1 | FHENFYDWAVRQVSKK | >2*10⁻⁵ | 0 |
| S226 | 1857 | F6 | − | 2 | QLEEEWAGVQCEVYGRECPS | 1.6*10⁻⁶ | |
| S227 | 1858 | F1 | − | 1 | CGGFHENFYDWFVRQVSKK | 5.1*10⁻⁷ | ++ |
| S228 | 1859 and 1860 | F1-F1 | N-N | 1-1 | (CGGFHENFYDWFVRQVSKK)₂ | 3.6*10⁻⁷ | ++ |
| | | | | | (linked at cysteines) | | |
| S229 | 1861 and 1862 | F2-F4 | C-C | 1-2 | SDGFYNAIELLS-Lig | 4.4*10⁻⁹ | 0 |
| | | | | | 12 | | |
| | | | | | KHLCVLEELFWGASLFGYCSGKK-Lig | | |
| S231 | 1863 and 1864 | F1-F1 | C-C | 1-1 | (FHENFYDWFVRQVSKKGGG-Lig)2-14 | 2.7*10⁻⁷ | + |
| S232 | 1865 and 1866 | F1-F1 | N-N | 1-1 | 14-(Lig-GGGFHENFYDWFVRQVSKK)2 | 3.8*10⁻⁷ | +++ |
| S233 | 1867 and 1868 | F1-F2 | C-C | 1-1 | FHENFYDWFVRQVSKK-Lig | 2.6*10⁻⁷ | + |
| | | | | | 14 | | |
| | | | | | SDGFYNAIELLS-Lig | | |
| S234 | 1869 | F1 | − | 1 | RVDWLQRNANFYDWFVAELG | 1.3*10⁻⁷ | ++ |
| S235 | 1870 | F1 | − | 1 | VDWLQRNANFYDWFVAELG | 5.3*10⁻⁸ | ++ |
| S236 | 1871 | F1 | − | 1 | DWLQRNANFYDWFVAELG | 1.0*10⁻⁷ | ++ |
| S237 | 1872 | F1 | − | 1 | WLQRNANFYDWFVAELG | 8.5*10⁻⁷ | 0 |
| S238 | 1873 | F1 | − | 1 | LQRNANFYDWFVAELG | 8.5*10⁻⁷ | 0 |
| S239 | 1874 | F1 | − | 1 | QRNANFYDWFVAELG | 1.3*10⁻⁶ | 0 |
| S240 | 1875 | F1 | − | 1 | RNANFYDWFVAELG | 1.4*10⁻⁶ | |
| S241 | 1876 | F1 | − | 1 | NANFYDWFVAELG | 1.6*10⁻⁶ | |
| S242 | 1877 | F1 | − | 1 | ANFYDWFVAELG | 2.0*10⁻⁶ | |
| S243 | 1878 | F1 | − | 1 | NFYDWFVAELG | 2.0*10⁻⁶ | |
| S244 | 1879 | F1 | − | 1 | GRVDWLQRNANFYDWFVAELG-Lig | 2.2*10⁻⁷ | ++ |
| S245 | 1880 | F1 | − | 1 | Lig-GRVDWLQRNANFYDWFVAELG | 2.2*10⁻⁷ | + |
| S246 | 1881 and 1882 | F8-F1 | C-C | 3-1 | ACAWFTYWNCGGGG-Lig | 5.0*10⁻⁶ | |
| | | | | 14 | | | |
| | | | | FHENFYDWFVRQVSKK-Lig | | | |
| S248 | 1883 | F1 | − | 1 | GRVDWLQRNANFYDWFVAEL | 6.3*10⁻⁸ | ++ |
| S249 | 1884 | F1 | − | 1 | GRVDWLQRNANFYDWFVAE | 7.4*10⁻⁷ | 0 |
| S250 | 1885 | F1 | − | 1 | GRVDWLQRNANFYDWFVA | 8.9*10⁻⁶ | 0 |
| S251 | 1886 | F1 | − | 1 | GRVDWLQRNANFYDWFV | 5.6*10⁻⁶ | |
| S252 | 1887 and 1888 | F2-F2 | C-C | 1-1 | (SDGFYNAIELLS-Lig)₂-14 | 44*10⁻⁷ | 0 |
| S253 | 1889 and 1890 | F1-F1 | C-C | 1-1 | (GRVDWLQRNANFYDWFVAELG-Lig)₂-14 | 2.2*10⁻⁸ | ++ |
| S255 | 1891 and 1892 | F2-F2 | C-C | 1-1 | (SDGFYNAIELLSGGG-Lig)₂-14 | 1.6*10⁻⁶ | 0 |
| S256 | 1893 | F6 | − | 2 | Acy-CLEEwGASL-Tic-QCSG | 9.0*10⁻⁶ | − |
| S257 | 1894 | F2 | − | 1 | RWFNFYGYFESLLTHFS | 1.4*10⁻⁵ | 0 |
| S259 | 1895 | F2 | − | 1 | EGWDFYSYFSGLLASVT | 7.7*10⁻⁶ | 0 |
| S260 | 1896 | F2 | − | 1 | LDRQFYRYFQDLLVGFM | 2.3*10⁻⁶ | 0 |
| S261 | 1897 | F2 | − | 1 | WGRSFYRYFETLLAQGI | >2*10⁻⁵ | 0 |
| S262 | 1898 | F4 | − | 1 | PLCFLQELFGGASLGGYCSG | 1.9*10⁻⁵ | 0 |
| S263 | 1899 | F6 | − | 2 | WLEQERAWIWCEIQGSGCRA | >2*10⁻⁵ | 0 |
| S264 | 1900 | F1 | − | 1 | IQGWEPFYGWFDDVVAQMFEE | 1.9*10⁻⁷ | 0 |
| S265 | 1901 | F1 | − | 1 | TGHRLGLDEQFYWWFRDALSG | 1.1*10⁻⁷ | 0 |
| S266 | 1902 | F6 | − | 2 | Abu-CLEEwGASL-Tic-QCSG | >2*10⁻⁵ | 0 |
| S268 | 1903 | F1 | − | 1 | RD-Hyp-FYDWEDDi | 4.5*10⁻⁷ | 0 |
| S273 | 1904 | F1-F2 | C-N | 1-1 | FHENFYDWFVRQVSKK-Lig-14-Lig-SDGFYNAIE | 1.5*10⁻⁶ | + |
| | | | | | LLS | | |
| S278 | 1905 | F1-derived | − | 1 | GFREGQRWYWFVAQVT | >2*10⁻⁵ | 0 |
| S281 | 1906 | F5 | − | DLRVLCELFGGAYVLGYCSE | 1.1*10⁻⁵ | 0 | |
| S282 | 1907 | F4-derived | − | HLSVGEELSWWVALLGQWAR | >2*10⁻⁵ | 0 | |
| S283 | 1908 | F4-derived | − | APVSTEELRWGALLFGQWAG | >2*10⁻⁵ | 0 | |
| S284 | 1909 | F6-derived | − | ALEEEWAWVQVRSIRSGLPL | >2*10⁻⁵ | 0 | |
| S285 | 1910 | F6-derived | − | WLEHEWAQIQCELYGRGCTY | 8.3*10⁻⁷ | | |
| S287 | 1911 | F1 | − | 1 | QAPSNFYDWFVREWDEE | 5.9*10⁻⁶ | 0 |
| S288 | 1912 | F2 | − | 1 | QSFYDYIEELLGGEWKK | 4.3*10⁻⁶ | 0 |
| S289 | 1913 | F2 | − | 1 | DPFYQGLWEWLRESGEE | >2*10⁻⁵ | 0 |
| S290 | 1914 and 1915 | F1-F1 | N-N | 1-1 | 7( Lig-GGGFHENFYDWFVRQVSKK)₂ | 9.0*10⁻⁷ | ++ |
| S291 | 1916 and 1917 | F1-F1 | N-N | 1-1 | 9-( Lig-GGGFHENFYDWFVRQVSKK)₂ | 1.2*10⁻⁶ | ++ |
| S292 | 1918 and 1919 | F1-F1 | N-N | 1-1 | 12-(Lig-GGGFHENFYDWFVRQVSKK)₂ | 75*10⁻⁷ | ++ |
| S293 | 1920 and 1921 | F1-F1 | N-N | 1-1 | 13-(Lig-GGGFHENFYDWFVRQVSKK)₂ | 1.2*10⁻⁷ | ++ |
| S294 | 1922 | F1 | − | 1 | DWLQRNANFYDWFVAEL-Lig | 1.3*10⁻⁷ | ++ |
| S295 | 1923 | F1 | − | 1 | Lig-DWLQRNANFYDWFVAEL | 4.8*10⁻⁷ | + |
| S300 | 1924 and 1925 | F1-F1 | C-C | 1-1 | (DWLQRNANFYDWFVAEL-Lig′)₂-14 | 5.0*10⁻⁸ | +++ |
| S301 | 1926 and 1927 | F1-F1 | N-N | 1-1 | 14-(Lig′-DWLQRNANFYDWFVAEL)₂ | 6.4*10⁻⁷ | + |
| S302 | 1928 | F2 | − | 1 | SDGFYNA-Acy-ELLSG | 8.6*10⁻⁷ | 0 |
| S303 | 1929 | F2 | − | 1 | SGPFYEE-Acy-ELLW-Aib-G | 5.7*10⁻⁶ | 0 |
| S304 | 1930 | F2 | − | 1 | GGSFYDD-Acy-E-Aib-LW-Aib-G | 2.1*10⁻⁵ | 0 |
| S305 | 1931 | F2 | − | 1 | N-Aib-PFYDE-Acy-DE-Cha-W-Aib-G | 8.4*10⁻⁷ | 0 |
| S306 | 1932 | F1 | − | 1 | GRVDWLQRNANFYDWFVAE-Acy-G | 2.2*10⁻⁶ | +++ |
| S312 | 1933 and 1934 | F1-F1 | N-N | 1-1 | 23-(Lig′-GGGFHENFYDWFVRQVSKK)₂ | 2.9*10⁻⁶ | ++ |
| S313 | 1935 and 1936 | F2-F2 | C-C | 1-1 | (SDGFYNAIELLS-Lig′)₂-23 | 2.4*10⁻⁷ | |
| S315 | 1937 | F1 | − | 1 | WFYDWFWE | 6.8*10⁻⁶ | 0 |
| S316 | 1938 | F10 | − | 1 | WQGYAWLS | 7.0*10⁻⁶ | 0 |
| S317 | 1939 | F10 | − | 1 | WFGYAWLS | >2*10⁻⁵ | 0 |
| S319 | 1940 | F1 | − | 1 | D-Aic-D-Aib-EFYDWFDEiPq | 8.7*10⁻⁷ | 0 |
| S320 | 1941 | F1 | − | 1 | KNNKEFYEWFDEiGq | 2.8*10⁻⁶ | 0 |
| S321 | 1942 | F1 | − | 1 | YeRD-Hyp-FYDWFDEiGg | 1.4*10⁻⁶ | 0 |
| S322 | 1943 | F1 | − | 1 | EWRD-Hyp-FYDWFDEi-Hyp-e | 7.2*10⁻⁷ | 0 |
| S325 | 1944 and 1945 | F1-F1 | N-N | 1-1 | 9-(Lig′-GSLDESFYDWFERQLGKK)₂ | 4.6*10⁻⁸ | +++++ |
| S326 | 1600 | F1 | − | ⁻¹ | GIISQSCPESFYDWFAGQVSDPWWCW | 59*107 | − |
| S327 | 1946 | F2 | − | 1 | TFYSCLASLLTGTPQPNRGPWERCRKK | 2.l*10⁻⁶ | − |
| S329 | 1947 and 1948 | F1-F1 | N-N | 1-1 | 17-(Lig′-FHENFYDWFVRQVSKK)₂ | 2.7*10⁻⁶ | ++ |
| S331 | 1949 | F4 | − | 2 | KHLCVLEELFWGASLFGYCSGKK | 1.6*10⁻⁶ | 0 |
| S332 | 1950 and 1951 | F1-F1 | C-C | 1-1 | (GSLDESFYDWFERQLGKK-Lig′)₂-9 | 2.1*10⁻⁸ | +++++ |
| S333 | 1952 and 1953 | F1-F1 | N-N | 1-1 | 22-(Lig′-GSLDESFYDWFERQLGKK)₂ | 1.4*10⁻⁷ | ++++ |
| S334 | 1954 and 1955 | F1-F1 | N-N | 1-1 | 22-(Lig′-GGGFHENFYDWFVRQVSKK)₂ | 1.6*10⁻⁶ | +++ |
| S335 | 1956 and 1957 | F1-F1 | C-C | 1-1 | (GSLDESFYDWFERQLGKK-Lig′)₂-22 | 9.8*10⁻⁸ | ++++ |
| S336 | 1958 and 1959 | F1-F1 | N-N | 1-1 | 23-(Lig′-GSLDESFYDWFERQLGKK)₂ | 1.5*10⁻⁸ | +++ |
| S337 | 1960 and 1961 | F1-F1 | C-C | 1-1 | (GSLDESFYDWFERQLGKK-Lig′)₂₋₂₃ | 1.1*10⁻⁸ | +++++ |
| S342 | 1962 | F1 | − | 1 | DLWFNAKEDMNFYDWFVWQLR | 1.8*10⁻⁶ | 0 |
| S344 | 1963 | F2 | − | 1 | EHWNTVDPFYHWISELLRESGA | 2.0*10⁻⁷ | 0 |
| S345 | 1964 | F2 | − | 1 | EHWNTVDPFYQYFAELLRESGA | 2.9*10⁻⁶ | 0 |
| S349 | 1965 and 1966 | F1-F1 | N-N | 1-1 | 23-(Lig′-GGGFHENFYDWFVRQVSKK)₂ | 1.3*10⁻⁷ | ++++ |
| S350 | 1967 and 1968 | F1-F1 | C-C | 1-1 | (GSLDESFYDWFERQLGKK-Lig′)₂-21 | 4.7*10⁻⁷ | ++++ |
| S351 | 1969 and 1970 | F1-F1 | N-N | 1-1 | 21-(Lig′-GSLDESFYDWFERQLGKK)₂ | 1.4*10⁻⁶ | +++ |
| S352 | 1971 and 1972 | F1-F1 | N-N | 1-1 | 21-(Lig′-GGGFHENFYDWFVRQVSKK)₂ | 6.6*10⁻⁷ | +++ |
| S353 | 1973 and 1974 | F1-F1 | C-C | 1-1 | (GSLDESFYDWFERQLGKK-Lig′)₂-14 | 1.1*10⁻⁸ | ++++++ |
| S354 | 1975 and 1976 | F1-F1 | N-N | 1-1 | 14-(Lig′-GSLDESFYDWFERQLGKK)₂ | 3.9*10⁻⁸ | ++++ |
| S359 | 1977 and 1978 | F1-F1 | N-N | 1-1 | 9-(Lig′-DWLQRNANFYDWFVAEL)₂ | 7.0*10⁻⁷ | + |
| S360 | 1979 and 1980 | F1-F1 | N-N | 1-1 | 23-(Lig′-DWLQRNANFYDWFVAEL)₂ | 9.9*10⁻⁷ | |
| S361 | 1981 and 1982 | F1-F1 | C-C | 1-1 | (GSLDESFYDWFERQLGKK-Lig′)₂-24 | 2.2*10⁻⁶ | +++ |
| S362 | 1983 and 1984 | F1-F1 | N-N | 1-1 | 24-(Lig′-GSLDESFYDWFERQLGKK)₂ | 1.1*10⁻⁷ | ++++ |
| S363 | 1985 and 1986 | F1-F1 | N-N | 1-1 | 24-(Lig′-GGGFHENFYDWFVRQVSKK)₂ | 2.2*10⁻⁷ | +++ |
| S365 | 1987 | F1 | − | 1 | RMYFSTGAPQNFYDWFVQEWD | 1.0*10⁻⁵ | 0 |
| S366 | 1988 | F1 | − | 1 | PLRESRNFYDWFVQQLE | 37*10⁻⁷ | 0 |
| S368 | 1989 | F2 | − | 1 | RGIRSDPFYHKLSELLQGH | >2*10⁻⁵ | 0 |
| S371 | 1558 | F1 | − | 1 | GSLDESFYDWFERQLGKK | 6.3.*10⁻⁷ | + |
| S372 | 1990 | F1 | − | 1 | SGSLDESFYDWFERQLGKK | 2.0*10⁻⁷ | ++ |
| S373 | 1991 | F1 | − | 1 | GSLDESFYDWFERQLGKKK(S) | 1.2*10⁻⁷ | +++ |
| S374 | 1992 and 1993 | F1-F1 | N-N | 1-1 | 17-(Ald-GlLDESFYDWFERQLGKK)₂ | 1.8*10⁻⁷ | ++++ |
| S375 | 1994 | F1-F1 | C-N | 1-1 | (GSLDESFYDWFERQLGKKK-Ald)-14-(Ald-GSL | 2.0*10⁻ | ++++ |
| | | | | | DESFYDWFERQLGKK) | | |
| S376 | 1995 and 1996 | F1-F1 | N-N | 1-1 | 19-(Ald-GSLDESFYDWFERQLGKK)₂ | 1.6*10⁻⁷ | ++++ |
| S378 | 1997 and 1998 | F1-F1 | C-C | 1-1 | (GSLDESFYDWFERQLGKKK-Ald)₂₋₁₇ | 6.5*10⁻⁸ | +++++ |
| S379 | 1999 and 2000 | F1-F1 | C-C | 1-1 | (GSLDESFYDWFERQLGKKK-Ald)₂₋₁₉ | 5.6*10⁻⁸ | +++++ |
| S380 | 2001 and 2002 | F1-F1 | C-C | 1-1 | (EEDWLQRNANFYDWFVAEL-Lig′)₂₋₉ | 5.1*10⁻⁷ | ++ |
| S381 | 2003 and 2004 | F1-F1 | C-C | 1-1 | (EEDWLQRNANFYDWFVAEL-Lig′)₂₋₂₃ | 1.2*10⁻⁷ | ++++ |
| S386 | 1559 | F1 | − | 1 | GSLDESFYDWFERQLG | 3.2*10⁻⁷ | + |
| S387 | 2005 | F1 | − | 1 | SLDESFYDWFERQLG | 6.3*10⁻⁷ | + |
| S388 | 2006 | F1 | − | 1 | LDESFYDWFERQLG | 3.4*10⁻⁷ | + |
| S389 | 2007 | F1 | − | 1 | DESFYDWFERQLG | 1.1*10⁻⁶ | + |
| S390 | 1794 | F1 | − | 1 | ESFYDWFERQLG | 6.2*10⁻⁷ | + |
| S391 | 2008 | F1 | − | 1 | SFYDWFERQLG | 1.5*10⁻⁶ | + |
| S392 | 2009 | F1 | − | 1 | FYDWFERQLG | 3.8*10⁻⁶ | 0 |
| S394 | 1788 | F1 | − | 1 | GSLDESFYDWFERQ | 9.1*10⁻⁸ | + |
| S395 | 1787 | F1 | − | 1 | GSLDESFYDWFERQL | 8.1*10⁻⁸ | ++ |
| S396 | 1789 | F1 | − | 1 | GSLDESFYDWFER | >2*10⁻⁵ | 0 |
| S397 | 2010 | F1 | − | 1 | GSLDESFYDWFE | >2*10⁻⁵ | 0 |
| S398 | 2011 | F1 | − | 1 | GSLDESFYDWF | >2*10⁻⁵ | 0 |
| S399 | 1790 | F1 | − | 1 | ESFYDWFERQL | 9.5*10⁻⁸ | ++ |
| S400 | 1791 | F1 | − | 1 | ESFYDWFERQ | 6.3*10⁻⁷ | 0 |
| S401 | 2012 | F1 | − | 1 | ESFYDWFER | >2*10⁻⁵ | 0 |
| S402 | 2013 | F1 | − | 1 | ESFYDWFE | >2*10⁻⁵ | 0 |
| S403 | 2014 | F1 | − | 1 | ESFYDWF | >2*10⁻⁵ | 0 |
| S414 | 2015 and 2016 | F1-F1 | C-C | 1-1 | (ESFYDWFERQLGK-Lig′)₂-14 | 3.8*10⁻⁷ | ++++ |
| S415 | 2017 and 2018 | F1-F1 | C-C | 1-1 | (ESFYDWFERQLGK-Lig′)₂-23 | 1.0*10⁻⁷ | ++++ |
| S416 | 2019 and 2020 | F1-F1 | N-N | 1-1 | 14-(Lig′-ESFYDWFERQLG)₂ | 9.3*10⁻⁷ | +++ |
| S417 | 2021 and 2022 | F1-F1 | N-N | 1-1 | 23-(Lig′-ESFYDWFERQLG)₂ | 9.2*10⁻⁷ | +++ |
| S418 | 2023 and 2024 | F1-F1 | C-C | 1-1 | (ESFYDWFERQLGK-Ald)₂₋₁₇ | 1.2*10⁻⁷ | ++++ |
| S419 | 2025 and 2026 | F6-F6 | N-N | 2-2 | 14-(Lig′-EWLDQEWAWVQCEWGRGCPSEE)₂ | | 0 |
| S420 | 2027 and 2028 | F1-F1 | N-N | 1-1 | 17-(Ald-ESFYDWFERQLG)₂ | | ++ |
| S423 | 2029 and 2030 | F1-F8 | C-C | 1-3 | ESFYDWFERQLG | 6.2*10⁻⁸ | 0 |
| | | | | | K | | |
| | | | | | ACAWPTYWNCG | | |
| S425 | 2031 | F1-F6 | C-N | 1-2 | GSLDESFYDWFERQLGKK-Lig′-14-Lig′-EWLDQ | 2.4*10⁻⁹ | − |
| | | | | | EWAWVQCEVYGRGCPSEE | | |
| S429 | 2032 | F6-F1 | C-N | 2-1 | EWLDQEWAWVQCEVYGRGCPSEE-Lig′-14-Lig′- | 6.0*10⁻ | |
| | | | | | GSLDESFYDWFERQLGKK | | |
| S432 | 2033 and 2034 | F1-F6 | C-C | 1-2 | ESFYDWFERQLGGGG | 1.8*10⁻⁷ | + |
| | | | | | K | | |
| | | | | | CEVYGRGCPS | | |
| S433 | 2035 and 2036 | F1-F6 | C-C | 1-2 | ESFYDWFERQLGGGG | 1.1*10⁻⁷ | + |
| | | | | | K | | |
| | | | | | WLDQEWAWVQ | | |
| S436 | 2037 and 2038 | F1-F6 | C-C | 1-2 | ESFYDWFERQLGGGG | 5.2*10⁻¹⁰ | +++ |
| | | | | | K | | |
| | | | | | WLDQEWAWVQCEWGRGCPS | | |
| S437 | 2039 and 2040 | F1-F6 | C-C | 1-2 | ESFYDWFERQLGGGG | 6.9*10⁻¹⁰ | +++ |
| | | | | | K | | |
| | | | | | LDQEWAWVQCEVYGRGCPS | | |
| S438 | 2041 and 2042 | F1-F6 | C-C | 1-2 | ESFYDWFERQLGGGG | 3.0*10⁻⁸ | ++ |
| | | | | | K | | |
| | | | | | DQEWAWVQCEVYGRGCPS | | |
| S439 | 2043 and 2044 | F1-F6 | C-C | 1-2 | ESFYDWFERQLGGGG | 4.6*10⁻⁸ | |
| | | | | | K | | |
| | | | | | QEWAWVQCEVYGRGCPS | | |
| S440 | 2045 and 2046 | F1-F6 | C-C | 1-2 | ESFYDWFERQLGGGG | 9.9*10⁻⁸ | |
| | | | | | K | | |
| | | | | | EWAWVQCEVYGRGCPS | | |
| S441 | 2047 and 2048 | F1-F6 | C-C | 1-2 | ESFYDWFERQLGGGG | 1.2*10⁻⁷ | |
| | | | | | K | | |
| | | | | | WAWVQCEVYGRGCPS | | |
| S442 | 2049 and 2050 | F1-F6 | C-C | 1-2 | ESFYDWFERQLGGGG | 1.6*10⁻⁷ | |
| | | | | | K | | |
| | | | | | AWVQCEVYGRGCPS | | |
| S443 | 2051 and 2052 | F1-F6 | C-C | 1-2 | ESFYDWFERQLGGGG | 1.7*10⁻⁷ | |
| | | | | | K | | |
| | | | | | WVQCEVYGRGCPS | | |
| S444 | 2053 and 2054 | F1-F6 | C-C | 1-2 | ESFYDWFERQLGGGG | 1.9*10⁻⁷ | |
| | | | | | K | | |
| | | | | | VQCEVYGRGCPS | | |
| S445 | 2055 and 2056 | F1-F6 | C-C | 1-2 | ESFYDWFERQLGGGG | 2.3*10⁻⁷ | |
| | | | | | K | | |
| | | | | | QCEVYGRGCPS | | |
| S453 | 2057 | F1 -F6 | C-N | 1-2 | GSLDESFYDWFERQLGKKK-Ald-17-Ald-KEWLDQ | 5.7*10⁻ | |
| | | | | | EWAWVQCEVYGRGCPSEE | | |
| S454 | 2058 and 2059 | F1-F6 | C-C | 1-2 | GSLDESFYDWFERQLGKKK-Ald | 3.8*10⁻¹⁰ | +++ |
| | | | | | 17 | | |
| | | | | | EWLDQEWAWVQCEVYGRGCPSEEK-Ald | | |
| S455 | 2060 | F6-F1 | C-N | 2-1 | EWLDQEWAWVQCEVYGRGCPSEEK-Ald-18-Ald-G | 1.1*10-⁻⁹ | ++++ |
| | | | | | SLDESFYDWFERQLGKK | | |
| S456 | 2061 and 2062 | F1-F6 | N-N | 1-2 | Ald-GSLDESFYDWFERQLGKK | 2.4*10⁻⁹ | +++ |
| | | | | | 17 | | |
| | | | | | Ald-KEWLDQEWAWVQCEVYGRGCPSEE | | |
| S457 | 2063 | F6-F1 | C-N | 2-1 | WLDQEWAWVQCEVYGRGCPSGGSGGSGSLDESFYDWF | 1.6*10⁻⁹ | ++++ |
| | | | | | ERQLG | | |
| S458 | 2064 | F6-F1 | C-N | 2-1 | WLDQEWAWVQCEVYGRGCPSGGSGGSGSLDESFYDWF | 3.2*10⁻⁹ | ++++ |
| | | | | | ERQLG | | |
| S459 | 2065 | F1-F6 | C-N | 1-2 | GSLDESFYDWFERQLGGGSGGSWLDQEWAWVQCEVYG | 7.6*10⁻¹¹ | − |
| | | | | | RGCPS | | |
| S467 | 2066 | F6-F1 | C-N | 2-1 | EWLDQEWAWVQCEVYGRGCPSEEK-Ald-16-Ald-G | 6.8*10⁻¹⁰ | ++++ |
| | | | | | SLDESFYDWFERQLGKK | | |
| S468 | 2067 | F6-F1 | C-N | 2-1 | EWLDQEWAWVQCEVYGRGCPSEEK-Ald-19-Ald-G | 4.0*10⁻ | ++++ |
| | | | | | SLDESFYDWFERQLGKK | | |
| S471 | 2068 | F6-F1 | C-N | 2-1 | LDQEWAWVQCEWGRGCPSESFYDWFERQLG | 6.7*10⁻¹⁰ | ++++ |
| S481 | 2069 | F6-F1 | C-N | 2-1 | HHHHHHKLDQEWAWVQCEVYGRGCPSESFYDWFERQL | | |
| | | | | | G | | |
| S482 | 2070 | F6-F1 | C-N | 2-1 | LDQEWAWVQCEWGRGCPSESFYDWFERQLG | | |
| S483 | 2071 | F6-F1 | C-N | 2-1 | LDEWAWVQCVEYGRGCPSESFYDWFERQLG | 5.2*10⁻⁸ | 0 |
| S484 | 2072 | F6-F1 | C-N | 2-1 | LDQEWAVQCEVYGRGCPSESFYDWFERQLG | 8.7*10⁻⁸ | 0 |
| S485 | 2073 | F6-F1 | C-N | 2-1 | LDQEWAWVCEVYGRGCPSESFYDWFERQLG | 1.6*10⁻⁷ | 0 |
| S486 | 2074 | F6-F1 | C-N | 2-1 | LDQEWAWVQCVYGRGCPSESFYDWFERQLG | 5.7*10⁻⁸ | 0 |
| S487 | 2075 | F6-F1 | C-N | 2-1 | LDQEWAWVQCEWGRCPSESFYDWFERQLG | | |
| S488 | 2076 | F6-F1 | C-N | 2-1 | LDQEWAWVQCEWGRGCSESFYDWFERQLG | | |
| S489 | 2077 | F6-F1 | C-N | 2-1 | LDQEWAWVQCEWGRGCPESFYDWFERQLG | | |
| S490 | 2078 | F6-F1 | C-N | 2-1 | LDQEWAWVQCEWGRGCESFYDWFERQLG | | |
| S491 | 2079 | F6-F1 | C-N | 2-1 | LDQEWAWVQCEWGRGCPSEFYDWFERQLG | | |
| S492 | 2080 | F6-F1 | C-N | 2-1 | LDQEWAWVQCEWGRGCPSESFYDWFRQLG | | |
| S493 | 2081 | F6-F1 | C-N | 2-1 | EWLDQEWAWVQCEVYGRGCPSEE-POX-Lys | | |
| | | | | | (biotin) | | |
| S494 | 2082 | F6-F1 | C-N | 2-1 | ADQEWAWVQCEVYGRGCPSESFYDWFERQLG | 1.7*10⁻⁸ | + |
| S495 | 2083 | F6-F1 | C-N | 2-1 | LAQEWAWVQCEWGRGCPSESFYDWFERQL | | |
| S496 | 2084 | F6-F1 | C-N | 2-1 | LDAEWAWVQCEWGRGCPSESFYDWFERQL | | |
| S497 | 2085 | F6-F1 | C-N | 2-1 | LDQAWAWVQCEWGRGCPSESFYDWFERQL | 2.5*10⁻⁹ | +++ |
| S498 | 2086 | F6-F1 | C-N | 2-1 | LDQEAAWVQCEVYGRGCPSESFYDWFERQL | 5.6*10⁻⁸ | + |
| S499 | 2087 | F6-F1 | C-N | 2-1 | LDQEWAAVQCEVYGRGCPSESFYDWFERQL | 6.2*10⁻¹⁰ | +++ |
| S500 | 2088 | F6-F1 | C-N | 2-1 | LDQEWAWAQCEWGRGCPSESFYDWFERQL | | |
| S501 | 2089 | F6-F1 | C-N | 2-1 | LDQEWAWVACEVYGRGCPSESFYDWFERQL | | |
| S502 | 2090 | F6-F1 | C-N | 2-1 | LDQEWAWVQCAWGRGCPSESFYDWFERQL | 3.0*10⁻⁹ | +++ |
| S503 | 2091 | F6-F1 | C-N | 2-1 | LDQEWAWVQCEAYGRGCPSESFYDWFERQL | | |
| S504 | 2092 | F6-F1 | C-N | 2-1 | LDQEWAWVQCEVAGRGCPSESFYDWFERQL | | |
| S505 | 2093 | F6-F1 | C-N | 2-1 | LDQEWAWVQCEWARGCPSESFYDWFERQL | | |
| S506 | 2094 | F6-F1 | C-N | 2-1 | LDQEWAWVQCEWGAGCPSESFYDWFERQL | | |
| S507 | 2095 | F6-F1 | C-N | 2-1 | LDQEWAWVQCEWGRACPSESFYDWFERQL | | |
| S508 | 2096 | F6-F1 | C-N | 2-1 | LDQEWAWVQCEWGRGCASESFYDWFERQL | | |
| S509 | 2097 | F6-F1 | C-N | 2-1 | LDQEWAWVQSEWGRGSPSESFYDWFERQL | | |
| S510 | 2098 | F6-F1 | C-N | 2-1 | SLEEEWAQVECEVYGRGCPSGGSGGSGLLDESFYHWF | 6.2*10⁻ | +++++ |
| | | | | | DRQLR | | |
| S511 | 2099 | F6-F1 | C-N | 2-1 | WLDQEWAWVQCEVYGRGCPSGGSGGSGRVDWLQRNAN | 3.8*10⁻⁺⁺ | |
| | | | | | FYDWFVAELG | | |
| S512 | 2100 | F6-F1 | C-N | 2-1 | WLDQEWAWVQCEVYGRGCPSGGSGGSSQAGSAFYAWF | 2.8*10⁻⁸ | ++ |
| | | | | | DQVLRTV | | |
| S513 | 2101 | F6-F1 | C-N | 2-1 | WLDQEWAWVQCEVYGRGCPSGGSGGSQSDAFYSGLWA | | |
| | | | | | LIGLSDG | | |
| S515 | 2102 | F6 | − | 2 | LDQEWAWVQCEVYGRGCPSPOX-Lys(Biotin) | | |
| S516 | 2103 | F4-F1 | C-N | 2-1 | H-Acy-CLEEwGASL-Tic-QCSGSESFYDWFERQL | | |
| S517 | 2104 | F6-F1 | C-N | 2-1 | SIEEEWAQIKCDVWGRGCPSESFYDWFERQL | | |
| S518 | 2105 | F6-F1 | C-N | 2-1 | RLEEEWAWVQCEWGRGCPSGSLDESFYDWFERQLG | 1.6*10⁻¹⁰ | +++++ |
| S519 | 2106 | F6-F1 | C-N | 2-1 | SLEEEWAQVECEVYGRGCPSGSLDESFYDWFERQLG | 2.0*10⁻ | +++++++ |
| S520 | 2107 | F6-F1 | C-N | 2-1 | SIEEEWAQIKCDVWGRGCPPGLLDESFYHWFDRQLR | 2.0*10⁻¹¹ | +++++ |
| S521 | 2108 | F4-F1 | C-N | 2-1 | HLCVLEELFWGASLFGYCSGGSLDESFYDWFERQL | 2.7*10⁻⁸ | + |
| S522 | 2109 | F4-F1 | C-N | 2-1 | HLCVLEELFWGASLFGYCSGGRVDWLQRNANFYDWFV | | |
| | | | | | AELG | | |
| S523 | 2110 | F6-F10 | C-N | 2-1 | WLDQEWAWVQCEVYGRGCPSDSDWAGYEWFEEQLD | 4.3*10⁻⁹ | ++ |
| S524 | 2111 | F6-F1 | C-N | 2-1 | HHHHHHKSLEEEWAQVECEVYGRGCPSGSLDESFYDW | | |
| | | | | | FERQLG | | |

7, 9,12,13,14,17,19, 20, 21, 22, 23, and 24 represent specific chemical linkers (see Table 3);
For FF0: 0 is no effect, + is agonist, − is antagonist.
Peptides listed on 3 lines consist of two different peptides, linked N-N or C-C, either by chemical linkage or by being synthesi ed on the two branches of an amino acid with two amino groups such as, e.g., lysine.
Acy = 1-amino-1-cyclohexanecarboxylic acid;
Cha = cyclohexylalanine;
Aib = 2-aminoisobutyric acid;
Hyp = Hydroxyproline;
Amino acids which are not capitalized are D-amino acids;
Lig = Diaminopropionic acid with a 2-aminohydroxyacetyl group (CO-CH2-O-NH2) on the side chain amino group;
Lig ′ = lysine with a 2-aminohydroxyacetyl group (CO-CH2-O-NH2) on the side chain amino group;
Ald = an aldehyde group obtained by periodate oxidation of a serine, either N-terminal or attached to the side chain amino group of lysine.

[0366] Results further indicated that S175-S175 dimer peptides (Site 1-Site 1) were less agonistic than S175 monomer peptides (++vs. +++). S175-S175 dimer peptides having a C-N linkage were less agonistic or equally agonistic as compared to S175-S175 dimer peptides having C-C or N-N linkages. F8-F8 dimer peptides, like the parent monomer, showed no agonist activity.

### Example 5

### Substrate Phosphorylation Assay (HIR Kinase)

[0367] WGA (wheat germ agglutinin)-purified recombinant human insulin receptor was mixed with either insulin or peptide in varying concentrations in substrate phosphorylation buffer (50 mM HEPES (pH 8.0), 3 mM MnCl₂, 10 mM MgCl₂, 0.05% Triton X-100, 0.1% BSA, 12.5 μM ATP). A synthetic biotinylated substrate peptide (Biotin-KSRGDYMTMQIG) was added to a final concentration of 2 μg/ml. Following a 1 h incubation at RT, the reactions were stopped by the addition of 50 mM EDTA. The reactions were transferred to Streptavidin coated 96-well microtiter plates (NUNC, Cat. No. 236001) and incubated for 1 h at RT. The plates were washed 3 times with TBS (10 mM Tris (pH 8.0), 150 mM NaCl).

[0368] Subsequently, a 2000-fold dilution of horseradish peroxidase (HRPO) conjugated phosphotyrosine antibody (Transduction Laboratories, Cat. No. E120H) in TBS was added. The plates were incubated for 30 min and washed 3 times with TBS. TMB (3,3′,5,5′-tetramethylbenzidine; Kem-En-Tec, Copenhagen, Denmark) was added. One substrate from Kem-En-Tec was added. After 10⁻¹⁵ min, the reaction was stopped by the addition of 1% acetic acid. The absorbance, representing the extent of substrate phosphorylation, was measured in a spectrophotometer at a wavelength of 450 nM.

[0369] The results indicated that the potency of the Site 1-Site 2 dimer, peptide 539, was 0.1 to 1% of that of insulin in all assays tested (Table 8), and the dose-response curves (FIGS. 17A-17B) had a shape similar to that of insulin dose-response curves, suggesting an insulin-like action mechanism. In addition, Site 1-Site 2 dimer peptides 537 and 538 were also active as specific insulin receptor antagonists (Table 8; FIGS. 16A-16C). Notably, Site 2-Site 1 dimer peptide 539 was more active in the kinase assay than Site 1-Site 1 homodimer peptides 521 and 535 (FIGS. 19A-19B), despite lower FFC potency (FIGS. 14A-14C; FIGS. 17A-17B). Similar results are shown in FIGS. 20A-B and FIGS. 21A-B. This data suggested that homodimer and heterodimer peptides used different mechanisms of action.

TABLE 8

| | | | | | | | | | |
|---|---|---|---|---|---|---|---|---|---|
| | | | | | | HIR | HIGF- | FFC | Kinase |
| | Mon./ | | SEQ ID | | Site | K_{D} | 1R K_{D} | Pot. | Pot. |
| Pep. | Link. | Sequence | NO: | Form | IR | (nM) | (nM) | (nM) | (nM) |

| | | | | | | | | | |
|---|---|---|---|---|---|---|---|---|---|
| HI | | | | na | na | | | | |
| HIGF- | | | | na | na | | | | |
| 1R | | | | | | | | | |
| 521 | RP9- | MADYKDDDDKGSLDESFYDWFE | 2112 | 1-1 | 1-1 | 25 | − | A 3 | 1400 |
| | 6aa- | RQLGKKGGSGGSGSLDESFYDW | | | | | | | |
| | RP9 | FERQLGKKAAA(ETAG)PG | | | | | | | |
| 535 | RP9- | MADYKDDDDKGSLDESFYDWFE | 2113 | 1-1 | 1-1 | 15 | − | A 2 | 1000 |
| | 12aa- | RQLGKKGGSGGSGGSGGSGSLD | | | | | | | |
| | RP9 | ESFYDWFERQLGKKMA(ETAG) | | | | | | | |
| | | PG | | | | | | | |
| 537 | RP9- | MADYKDDDDKGSLDESFYDWFE | 2114 | 1-6 | 1-2 | 0.092 | 980 | N 10 | Inactive |
| | 6aa- | RQLGKKGGSGGSWLDQEWAWVQ | | | | | | | |
| | D8 | CEVYGRGCPSAAA(ETAG)PG | | | | | | | |
| 538 | RP9- | MADYKDDDDKGSLDESFYDWFE | 2115 | 1-6 | 1-2 | 0.080 | 710 | N 10 | Inactive |
| | 12aa- | RQLGKKGGSGGSGGSGGSWLDQ | | | | | | | |
| | D8 | EWAWVQCEVYGRGCPSAAA(ET | | | | | | | |
| | AG)PG | | | | | | | | |
| 539 | D8- | MADYKDDDDKWLDQEWAWVQCE | 2116 | 6-1 | 2-1 | 0.530 | 1500 | A 10 | 110 |
| | 6aa- | WGRGCPSGGSGGSGSLDESFYD | | | | | | | |
| | RP9 | WFERQLGKKAAA(ETAG)PG | | | | | | | |

A = agonist;
N = antagonist;
na = not applicable;
Form. = formula;
Mon. = constituent monomers;
Link. = linker;
Pot. = potency;
HI and HIGF-1R are controls;
All with tags at both ends;
All dimers are linked C-N;
Linker sequences are underlined.

### Example 6

### IR Autophosphorylation Assays

[0370] IR activation was assayed by detecting autophosphorylation of an insulin receptor construct transfected into 32D cells (Wang et al., 1993, Science 261:1591-1594; clone 969). The IR transfected 32D cells were seeded at 5×10⁶ cells/well in 96-well tissue culture plates and incubated overnight at 37° C. Samples were diluted 1:10 in the stimulation medium (PRIM1640 with 25 nM HEPES pH 7.2) plus or minus insulin. The culture media was decanted from the cell culture plates, and the diluted samples were added to the cells. The plates were incubated at 37° C. for 30 min. The stimulation medium was decanted from the plates, and cell lysis buffer (50 mM HEPES pH 7.2, 150 mM NaCl, 0.5% Triton X-100, 1 mM AEBSF, 10 KIU/ml aprotinin, 50 μM leupeptin, and 2 mM sodium orthovanadate) was added. The cells were lysed for 30 min.

[0371] In the ELISA portion of the assay, the cell lysates were added to the BSA-blocked anti-IR unit mAb (Upstate Biotechnology, Lake Placid, N.Y.) coated ELISA plates. After a 2 h incubation, the plates were washed 6 times with PBST and biotinylated anti-phosphotyrosine antibody (Upstate Biotechnology) is added. After another 2 h incubation, the plates were again washed 6 times. Streptavidin-Eu was then added, and the plates were incubated for 1 h. After washing the plates again, EG&G Wallac enhancement solution (100 mM acetone-potassium hydrogen pthalate, pH 3.2; 15 mM 2-naphtyltrifluoroacetate; 50 mM tri(n-octyl)-phosphine oxide; 0.1% Triton X-100) was added into each well, and the plates were placed onto a shaker for 20 min at RT. Fluorescence of samples in each well was measured at 615 nm using a VICTOR 1420 Multilabel Counter (EG&G Wallac).

[0372] Alternatively, IR autophosphorylation was determined using a holoenzyme phosphorylation assay. In accordance with this assay, 1 μl of purified insulin receptor (isolated from a Wheat Germ Agglutinin Expression System) was incubated with 25 nM insulin, or 10 or 50 μM peptide in 50 μl autophosphorylation buffer (50 mM HEPES pH. 8.0, 150 mM NaCl, 0.025% Triton-X-100, 5 mM MnCl₂, 50 μM sodium orthovanadate) containing 10 μM ATP for 45 min at 22° C. The reaction was stopped by adding 50 μl of gel loading buffer containing β-mercaptoethanol (Bio-Rad Laboratories, Inc., Hercules, Calif.). The samples were run on 4-12% SDS-polyacrylamide gels. Western Blot analysis was performed by transferring the proteins onto nitrocellulose membrane. The membrane was blocked in PBS containing 3% milk overnight. The membrane was incubated with anti-phosphotyrosine 4G10 HRP labeled antibody (Upstate Biotechnology) for 2 h. Protein bands were visualized using SuperSignal West Dura Extended Duration Substrate Chemiluminescence Detection System (Pierce Chemical Co.).

### Example 7

### Fluorescence-Based HIR Binding Assays

[0373] A. Time-Resolved Fluorescence Resonance Energy Transfer Assays

[0374] Time-resolved fluorescence resonance energy transfer assays (TR-FRET) were used for peptide competition studies. In one set of assays, monomer and dimer peptides were tested for the ability to compete with biotinylated RP9 monomer peptide (b-RP9) for binding to HIR-immunoglobulin heavy chain chimera (sIR-Fc; Bass et al., 1996). The assays were performed using a 384-well white microplate (NUNC) with a final volume of 30 μl. Final incubation conditions were in 22 nM b-RP9, 1 nM SA-APC (streptavidin-allophycocyanin), 1 nM Eu³⁺-sIR-Fc (LANCE™ labeled, PE Wallac, Inc.), 0.05 M Tris-HCl (pH 8 at 25° C.), 0.138 M NaCl, 0.0027 M KCl, and 0.1% BSA (Cohn Fraction V). After 16-24 h of incubation at RT, the fluorescence signal at 665 nm and 620 nm was read on a Victor² 1420 plate reader (PE Wallac, Inc.). Primary data were background corrected, normalized to buffer controls, and then expressed as percent of specific binding.

[0375] Results are shown in FIGS. 22A-22B. FIG. 21A shows b-RP9 competition data. For these figures, the Z′-factor was greater than 0.5 (Z′=1−(3σ₊+3σ₋)/|μ₊−μ₋|; Zhang et al., 1999, J. Biomol. Screen. 4:67-73), and the signal-to-background (S/B) ratio was ˜4-5. In FIG. 22A, each data point represents the average of two replicate wells. The lines represent the best fit to a four-parameter non-linear regression analysis of the data according to the following formula: y=min+(max−min)/(1+10̂((log IC₅₀-x)*Hillslope)). This was used to determine IC₅₀ values.

[0376] In another set of assays, monomer and dimer peptides were tested for the ability to compete with biotinylated-S175 (b-S175) or b-RP9 for binding to sIR-Fc. The TR-FRET assays were performed in a 384-well white microplate with a final volume of 30 μl. Final incubation conditions were in 33 nM b-S175 or 22 nM b-RP9, 1 nM SA-APC, 1 nM Eu³⁺-sIR-Fc, 0.05 M Tris-HCl (pH 8 at 25° C.), 0.138 M NaCl, 0.0027 M KCl, and 0.1% BSA. After 16-24 h of incubation at RT, the fluorescence signal at 665 nm and 620 nm was read on a Victor² 1420 plate reader. Primary data were background corrected, normalized to buffer controls, and then expressed as % specific binding.

[0377] Results are shown in FIGS. 23A-23B. For these figures, each data point represents the average of two replicate wells. The lines represent the best fit to a four-parameter non-linear regression analysis of the data, which was used to determine IC₅₀ values. FIG. 23A shows b-S175 competition data; FIG. 23B shows b-RP9 competition data.

[0378] B. Fluorescence Polarization Assays

[0379] Fluorescence polarization assays (FP) were used for peptide competition studies. In one set of assays monomer and dimer peptides were tested for the ability to compete with fluorescein-RP9 (FITC-RP9) for binding to soluble HIR ectodomain (sIR; Kristensen et al., 1998, J. Biol. Chem. 273:17780-17786). The assays were performed in a 384-well black microplate (NUNC) with a final volume of 30 μl. Final incubation conditions were 1 nM FITC-RP9, 10 nM sIR, 0.05 M Tris-HCl (pH 8 at 25° C.), 0.138 M NaCl, 0.0027 M KCl, 0.05% BGG (bovine gamma globulin), 0.005% Tween-20. After 16-24 h of incubation at RT, the fluorescence signal at 520 nm was read on an Analyst™ AD plate reader (LJL BioSystems, Inc.). Primary data were background corrected using 10 nM sIR without FITC-RP9 addition, normalized to buffer controls, and then expressed as percent of specific binding. The Z′-factor was greater than 0.5 and the assay dynamic range was ˜125 mP. In FIGS. 24-27, each data point represents the average of two replicate wells. The lines represent the best fit to a four-parameter non-linear regression analysis of the data, which was used to determine IC₅₀ values. The Z′-factor was greater than 0.5 and the assay dynamic range was ˜125 mP. Results are shown in FIGS. 24A-24B.

[0380] In another set of assays, monomer and dimer peptides were tested for the ability to compete with FITC-RP9 for binding to soluble human insulin mini-receptor (mIR; Kristensen et al., 1999, J. Biol. Chem. 274:37351-37356). The FP assays were performed in a 384-well black microplate with a final volume of 30 μl. Final incubation conditions were 2 nM FITC-RP9, 20 nM mIR, 0.05 M Tris-HCl (pH 8 at 25° C.), 0.138 M NaCl, 0.0027 M KCl, 0.001% BGG, 0.005% Tween-20. After 16-24 h of incubation at RT, the fluorescence signal at 520 nm was read on an Analyst™ AD plate reader. Primary data were background corrected using 20 nM mIR without FITC-RP9 addition, normalized to buffer controls and then expressed as percent of specific binding. Results are shown in FIGS. 25A-25B.

[0381] Monomers and dimer peptides were also tested for the ability to compete with fluorescein-insulin (FITC-Insulin) for binding to sIR. The FP assays were performed in a 384-well black microplate with a final volume of 30 μl. Final incubation conditions were in 2 nM FITC-Insulin, 20 nM sIR, 0.05 M Tris-HCl (pH 8 at 25° C.), 0.138 M NaCl, 0.0027 M KCl, 0.05% BGG, 0.005% Tween-20. After 16-24 h of incubation at RT, the fluorescence signal at 520 nm was read on an Analyst™ AD plate reader. Primary data were background corrected using 20 nM sIR without FITC-Insulin addition, normalized to buffer controls and then expressed as percent of specific binding. Results are shown in FIGS. 26A-26B.

[0382] In other assays, peptide monomers and dimer peptides were tested for the ability to compete with FITC-Insulin for binding to mIR. The FP assays were performed in a 384-well black microplate with a final volume of 30 μl. Final incubation conditions were 2 nM FITC-Insulin, 20 nM mIR, 0.05 M Tris-HCl (pH 8 at 25° C.), 0.138 M NaCl, 0.0027 M KCl, 0.05% BGG (bovine gamma globulin), 0.005% Tween-20. After 16-24 h of incubation at RT, the fluorescence signal at 520 nm was read on an Analyst™ AD plate reader. Primary data were background corrected using 20 nM mIR without FITC-RP9 addition, normalized to buffer controls and then expressed as % specific binding. Results are shown in FIGS. 27A-27B.

[0383] C. Summary

[0384] Table 9, below, summarizes the binding data calculated from competition assays using the IR constructs, sIR-Fc, sIR, and mIR, in TR-FRET and FP formats. The data in Table 9 indicate that most dimer peptides (e.g., S291 and S375 or S337), showed greater agonist activity than the corresponding monomer peptides (e.g., H2C or RP9, respectively) in the FFC assay. It was previously demonstrated that an inequality between monomer peptides and insulin was exhibited in competition assays where the assay reporter was a monomer peptide (i.e., RP9 or S175). This inequality was also demonstrated by dimer peptides as seen in Table 9. Table 9 further shows that Group 6 monomer peptides such as E8 (D120) were able to compete with FITC-RP9 or b-RP9 peptides for binding to sIR-Fc, but did not compete peptide ligands, such as FITC-RP9 for binding to mIR. Experiments using different IR constructs thereby allowed differentiation of Site I peptides based on sequence motifs (i.e., Group 6 (Formula 10) vs. Group 1 (Formula 1; A6)).

TABLE 9

| | | | | TARGET | | | |
|---|---|---|---|---|---|---|---|
| | | | | sIR-Fc | | sIR-Fc | |
| | | | | Label | | | |
| | | | | b-S175 | | b-RP9 | |
| | | | | FRET | | FRET | |
| Monomer | SEQ ID | | | IC50 | | IC50 | |
| or Dimer | NO: | Linkage | Sequence | (nM) | Hill | (nM) | Hill |
| H2C | 2117 | | FHENFYDWFVQRVSKK | 410 | −0.82 | 1626 | −1.03 |
| S291 | 1916 | N-N | (Lig-GGG-H2C)₂-9 | 81 | −0.96 | 250 | −0.69 |
| | and | | | | | | |
| | 1917 | | | | | | |
| RP9 | 1558 | | GSLDESFYDWFERQLGKK | 6 | −0.45 | 42 | −0.69 |
| S375 | 1994 | C-N | (RP9-Lig)-14-(RP9-Lig) | 7 | −0.80 | 86 | −0.67 |
| S337 | 1960 | C-C | (RP9-Lig)₂-23 | 0.2 | −0.36 | 14 | −0.57 |
| | and | | | | | | |
| | 1961 | | | | | | |
| S391 | 2008 | | truncated-(-GSLDE)RP9(-KK) | 59 | −0.59 | 610 | −0.56 |
| S390 | 1794 | | truncated(-GSLD)RP9(-KK) | 27 | −0.49 | 127 | −0.49 |
| S414 | 2015 | C-C | (truncated(-GSLD)RP9(-KK))₂-14 | 92 | −0.62 | 164 | −0.73 |
| | and | | | | | | |
| | 2016 | | | | | | |
| S175 | 1560 | | GRVDWLQRNANFYDWFVAELG | 22 | −0.58 | 64 | −0.74 |
| S380 | 2001 | C-C | (EE-short-S175-Lig)₂-9 | 10 | −0.55 | 23 | −0.64 |
| | and | | | | | | |
| | 2002 | | | | | | |
| E8 (D120) | 2118 | | GGTVWPGYEWLRNA | 755 | −0.74 | | |
| Insulin | | | | 59 | −0.37 | 63 | −0.46 |

| | TARGET | | | | | | | |
|---|---|---|---|---|---|---|---|---|
| | sIR-Fc | | sIR | | mIR | | HIR | |
| | Label | | | | | | | |
| | | | | | | | ¹²⁵I- | |
| | FITC-RP9 | | FITC-RP9 | | FITC-RP9 | | insulin | |
| | FP | | FP | | FP | | RRA | |
| Monomer | IC50 | | IC50 | | IC50 | | IC50 | |
| or Dimer | (nM) | Hill | (nM) | Hill | (nM) | Hill | (nM) | FFC |
| H2C | 50 | −0.27 | 37 | −0.49 | 770 | −0.89 | 700 | + |
| S291 | | | 12 | −0.35 | 668 | −0.38 | 1200 | ++++ |
| RP9 | 10 | −0.41 | 0.03 | −0.29 | 49 | −0.53 | 44 | +/0 |
| S375 | | | 0.2 | −0.22 | 91 | −0.80 | 200 | ++++ |
| S337 | 1 | −0.37 | 0.2 | −0.28 | 111 | −0.70 | 11 | +++++ |
| S391 | | | 119 | −0.49 | 284 | −0.77 | 1500 | NN |
| S390 | | | 19 | −0.64 | 94 | −0.94 | 620 | + |
| S414 | | | 0.2 | −0.25 | 151 | −0.69 | NN | NN |
| S175 | 10 | −0.56 | 1 | −0.36 | 167 | −1.72 | 230 | +++ |
| S380 | | | 0.5 | −0.29 | 27 | −0.49 | 510 | ++ |
| E8 (D120) | 207 | −0.49 | | | >100000 | | 2200 | − |
| Insulin | >100000 | −0.25 | 1250 | — | 172 | −0.78 | 0.04 | +++++ |

FRET = Time-Resolved Fluorescence Resonance Energy Transfer Assay;
FP = Fluorescence Polarization Assay;
RRA = Radio-Receptor Assay;
FFC = Free Fat Cell Assay;
N-N = N-terminal linkage;
C-C = C-terminal linkage;
All are site 1 (formula 1) monomers or site 1-site 1 (formula 1-formula 1)dimers;

[0385] Based on the functional studies outlined above, the following peptide dimers were designed.

| SEQ | | |
|---|---|---|
| ID | Monom./ | |
| NO: | Linkers | Sequence |
| 2119 | F8-6aa- | HLCVLEELFWGASLFGYCSGGGSGGSGSLDESFYDWF |
| | RP9 | ERQL |
| 2120 | F8-12aa- | HLCVLEELFWGASLFGYCSGGGSGGSGGSGGSGSLDE |
| | RP9 | SFYDWFERQL |
| 2121 | D8-6aa- | WLDQEWAWVQCEVYGRGCPSGGSGGSGRVDWLQRNAN |
| | S175 | FYDWFVAELG |
| 2122 | D8-12aa- | WLDQEWAWVQCEVYGRGCPSGGSGGSGGSGGSGRVDW |
| | 5175 | LQRNANFYDWFVAELG |
| 2123 | F8-6aa- | HLCVLEELFWGASLFGYCSGGGSGGSGRVDWLQRNAN |
| | 5175 | FYDWFVAELG |
| 2124 | F8-12aa- | HLCVLEELFWGASLFGYCSGGGSGGSGGSGGSGRVDW |
| | 5175 | LQRNANFYDWFVAELG |
| 2125 | D8-6aa- | HLCVLEELFWGASLFGYCSGGGSGGSSQAGSAFYAWF |
| | RP 15 | DQVLRTV |
| 2126 | D8-6aa- | HLCVLEELFWGASLFGYCSGGGSGGSTFYSCLASLLT |
| | RP6 | GTPQPNRGPWERCR |
| 2127 | D8-6aa- | HLCVLEELFWGASLFGYCSGGGSGGSQSDAFYSGLWA |
| | RP17 | LIGLSDG |
| 2128 | D8-6aa- | HLCVLEELFWGASLFGYCSGGGSGGSDSDWAGYEWFE |
| | Grp6 | EQLD |

Linker sequences are underlined and in bold; Monomer sequences are shown below; All dimers are linked C-N.

| | | | | |
|---|---|---|---|---|
| SEQ | | For- | | |
| ID NO: | Monomer | mula | Site | Sequence |

| | | | | |
|---|---|---|---|---|
| 1576 | F8 | 4 | 2 | HLCVLEELFWGASLFGYCSG |
| 1558 | RP9 | 1 | 1 | GSLDESFYDWFERQL |
| 2129 | D8 | 6 | 2 | WLDQEWAWVQCEVYGRGCPS |
| 1560 | S175 | 1 | 1 | GRVDWLQRNANFYDWFVAELG |
| 2130 | RP15 | 1 | 1 | SQAGSAFYAWFDQVLRTV |
| 1635 | Rp6 | 2 | 1 | TFYSCLASLLTGTPQPNRGPWERCR |
| 2131 | RP17 | 1 | 1 | QSDAFYSGLWALIGLSDG |
| 1595 | Group 6 | 10 | 1 | DSDWAGYEWFEEQLD |

### Example 8

### Peptide Fusions to the Maltose Binding Protein

[0386] A. Cloning

[0387] The transfer of interesting peptide sequences from phage display to maltose binding protein (MBP) fusions is desirable for several reasons. First, to obtain a more sensitive affinity estimate, the polyvalency of phage display peptides should be converted to a monovalent system. For this purpose, the peptide sequences are fused to MBP that generally exists as a monomer with no cysteine residues. Second, competition experiments can be carried out with the same or different peptides, one phage displayed and the other fused to MBP. Lastly, purified peptides can be obtained by cleavage of the fusion protein at a site engineered in the DNA sequence.

[0388] FIG. 28 shows a schematic drawing of the MBP-peptide construct. In the construct, the N-terminus of the peptide sequence is fused to the C-terminus of the MBP. Two peptide-flanking epitope tags are included, a shortened-FLAG® at the N-terminus and E-Tag at the C-terminus. The corresponding gene fusion was generated by ligating a vector fragment encoding the MBP in frame with a PCR product encoding the peptide of interest. The vector fragment was obtained by digesting the plasmid pMAL-c2 (New England Biolabs) with EcoRI and HindIII and then treating the fragment with shrimp alkaline phosphatase (SAP; Amersham). The digested DNA fragment was resolved on a 1% agarose gel, excised, and purified by QIAEXII (QIAGEN). The 20-amino acid peptide sequences of interest were initially encoded in the phage display vector pCANTAB5E (Pharmacia). To obtain these sequences, primers were synthesized which anneal to sequences encoding the shortened FLAG® or E-Tag epitopes and also contain the required restriction enzyme sites EcoRI and HindIII. PCR products were obtained from individual phage clones and digested with restriction enzymes to yield the insert fragment. The vector and insert were ligated overnight at 15° C. The ligation product was purified using QIAquick spin columns (QIAGEN) and electroporations were performed at 1500 v in an electroporation cuvette (0.1 mm gap; 0.5 ml volume) containing 10 ng of DNA and 40 μl of E. coli strain ER2508 (RR1 lon:mini Tn10 (Tet^{r}) (malB) (argF-lac) U169 Pro⁺ zjc::Tn5(Kan^{r}) fhuA2) electrocompetent cells (New England Biolabs). Immediately after the pulse, 1 ml of pre-warmed (40° C.) 2xYT medium containing 2% glucose (2xYT-G) was added and the transformants were grown at 37° C. for 1 h. Cell transformants were plated onto 2xYT-AG plates and grown overnight at 37° C. Sequencing confirmed the clones contained the correct constructs.

[0389] B. Small-Scale Expression of Soluble MBP-Peptide Fusion Proteins

[0390] E. coli ER2508 (New England Biolabs) carrying the plasmids encoding MBP-peptide fusion proteins were grown in 2xYT-AG at 37° C. overnight (250 rpm). The following day the cultures were used to inoculate media (2x YT containing-G) to achieve an OD₆₀₀ of 0.1. When the cultures reached an OD₆₀₀ of 0.6, expression was induced by the addition of IPTG to a final concentration of 0.3 mM and then cells were grown for 3 h. The cells were pelleted by centrifugation and samples from total cells were analyzed by SDS-PAGE electrophoresis. The production of the correct molecular weight fusion proteins was confirmed by Western blot analysis using the monoclonal antibody anti-E-Tag-HRP conjugate (Pharmacia).

[0391] C. Large-Scale Expression of Soluble MBP-Peptide Fusion Proteins

[0392] E. coli ER2508 carrying plasmids encoding the MBP-peptide fusion proteins were grown in 2xYT-AG media for 8 h (250 rpm, 37° C.). The cultures were subcultured in 2xYT-AG to achieve an OD₆₀₀ of 0.1 and grown at 30° C. overnight. This culture was used to inoculate a fermentor with medium of following composition (g/l): glucose (3.00); (NH₄)₂SO₄ 5.00; MgSO₄.7H₂O (0.25); KH₂PO₄ (3.00); citric acid (3.00); peptone (10.00); and yeast extract (5.00); pH 6.8.

[0393] The culture was grown at 700 rpm, 37° C. until the glucose from the medium was consumed (OD₆₀₀=˜6.0-7.0). Expression of the fusion protein was induced by the addition of 0.3 mM IPTG and the culture was grown for 2 h in fed-batch mode fermentation with feeding by 50% glucose at a constant rate of 2 g/l/h. The cells were removed from the medium by centrifugation. Samples of the cell pellet were analyzed by SDS-PAGE followed by the Western blot analysis using the mouse monoclonal antibody anti-E-Tag-HRP conjugate (Pharmacia) to visualize the expressed product.

[0394] D. Purification

[0395] The cell pellets were disrupted mechanically by sonication or chemically by treatment with the mild detergent Triton X-100. After removal of cell debris by centrifugation, the soluble proteins were prepared for chromatographic purification by dilution or dialysis into the appropriate starting buffer. The MBP fusions were initially purified either by amylose affinity chromatography or by anion exchange chromatography. Final purification was performed using anti-E-Tag antibody affinity columns (Pharmacia). The affinity resin was equilibrated in TBS (0.025 M Tris-buffered saline, pH 7.4) and the bound protein was eluted with Elution buffer (100 mM glycine, pH 3.0). The purified proteins were analyzed for purity and integrity by SDS-PAGE and Western blot analysis according to standard protocols.

[0396] For MBP fusions, IR agonist activity was observed for the Site 1-Site 1 dimer peptides shown in Table 10, below. Additional binding data for the MBP fusions are shown in Table 11, also below.

TABLE 10

| | | | | | | | | | |
|---|---|---|---|---|---|---|---|---|---|
| | Monomer/ | | SEQ ID | | | Site | Fus. | MW | |
| Fus. | Linker | Sequence | NO: | Form. | Act. | IR | Conc. | (kDa) | K_{d}(HIR) |

| | | | | | | | | | |
|---|---|---|---|---|---|---|---|---|---|
| 426 | D8 | MBP . . . NNNNLGIEGRISEFIEGRAQPAMA | 2132 | 6 | N | 2 | 0.76 | 52.2 | 1.4 × 10⁻⁶ |
| | | WLDQEWAWVQCEVYGRGCPSMA(ETAG)AA | | | | | | | |
| 429 | D8-6aa-D8 | MBP. . . NNNNLGIEGRISEFIEGRAQPAMAW | 2133 | 6-6 | N-N | 2-2 | 3.2 | 55.3 | 1.3 × 10⁻⁶ |
| | | LDQEWAWVQCEVYGRGCPSGGSGGSKWLDQEWAW | | | | | | | |
| | | VQCEVYGRGCPSMA(ETAG)AA | | | | | | | |
| 430 | H20-4aa-RB6 | MBP . . . NNNNLGIEGRISEFIEGRDYKDDD | 2134 | 1-6 | A- | 1-1 | 0.17 | 54.5 | 2.1 × 10⁻⁶ |
| | | DKFHENFYDWFVRQVSGSGSLDALDRLMRYFEER | | | | | | | |
| | | PSLETAG | | | | | | | |
| 431 | H20-6aa-F8 | MBP. . . NNNNLGIEGRISEFIEGRDYKDDDK | 2135 | 1-4 | A-N | 1-2 | 3.3 | 54.8 | 4.7 × 10⁻ |
| | | FHENFYDWFVRQVSGGSGGSHLCVLEELFWGASL | | | | | | | |
| | | FGYCSGAAA(ETAG)AA | | | | | | | |
| 432 | H20-12aa-F8 | MBP-NNNNLGIEGRISEFIEGRDYKDDDKFHENF | 2136 | 1-4 | A-N | 1-2 | 2.9 | 55.5 | 3.5 × 10⁻ |
| | | YDWFVRQVSGGSGGSGGSGGSHLCVLEELFWGAS | | | | | | | |
| | | LFGYCSGAAA(ETAG)AA | | | | | | | |
| 433 | H20-9aa-F8 | MBP . . . NNNNLGIEGRISEFIEGRDYKDDD | 2137 | 1-4 | A-N | 1-2 | 2.8 | 55.2 | 2.1 × 10⁻⁸ |
| | | KFHENFYDWFVRQVSGGSGGSGGSHLCVLEELFW | | | | | | | |
| | | GASLFGYCSGMA(ETAG)AA | | | | | | | |
| 434 | G3-12aa-G3 | MBP . . . NNNNLGIEGRISEFIEVRAQPAMA | 2138 | 1-1 | N-N | 1-1 | 0.01 | 56 | 3.2 × 10⁻⁶ |
| | | RGGGTFYEWFESALRKHGAGGGSGGSGGSGGSRG | | | | | | | |
| | | GGTFYEWFESALRKHGAGAAA(ETAG)AA | | | | | | | |
| 436 | H2C-9aa-H2C | MBP . . . NNNNLGIEGRISEFIEGRAQPAMA | 2139 | 1-1 | A | 1-1 | 1.1 | 54.2 | 4.1 × 10⁻ |
| | | FHENFYDWFVRQVSGGSGGSGGSFHENFYDWFVR | | | | | | | |
| | | QVSMA(ETAG)AA | | | | | | | |
| 437 | H2C | MBP . . . NNNNLGIEGRISEFIEGRAQPAMA | 2140 | 1 | N-N | 1 | 0.3 | 51.5 | 8.3 × 10⁻⁶ |
| | | FHENFYDWFVRQVSAAA(ETAG)AA | | | | | | | |
| 427 | G3-6aa-G3 | MBP . . . NNNNLGIEGRISEFIEGRAQPAMA | 2141 | 1-1 | N-N | 1-1 | 0.02 | 55.3 | 3.3 × 10⁻ |
| | | RGGGTFYEWFESTLRKHGAGGGSGGSRGGGTFYE | | | | | | | |
| | | WFESALRKHGAGAAA(ETAG)AA | | | | | | | |
| 435 | H2C-3aa-H2C- | MBP . . . NNNNLGIEGRISEFIEGRAQPAMA | 2142 | 1-1-1 | A-A-A | 1-1-1 | 2.1 | 55.5 | 2.0 × 10⁻⁶ |
| | 3aa-H2C | FHENFYDWFVRQVSGGSFHENFYDWFVRQVSGGS | | | | | | | |
| | | FHENFYDWFVRQVSAAA(ETAG)AA | | | | | | | |
| 439 | H2C-6aa-H2C | MBP . . . NNNNLGIEGRISEFIEGRAQPAMA | 2143 | 1-1 | A-A | 1-1 | 1.4 | 53.9 | 5.5 × 10⁻⁷ |
| | | FHENFYDWFVRQVSGGSGGSFHENFYDWFVRQVS | | | | | | | |
| | | (ETAG)AA | | | | | | | |
| 449 | H2C-12aa-H2C | MBP . . . NNNNLGIEGRISEFIEGRAQPAMA | 2144 | 1-1 | | 1-1 | 1.5 | 51.8 | 6.2× 10⁻⁷ |
| | | FHENFYDWFVRQVSGGSGGSGGSGGSAQPAMAFH | | | | | | | |
| | | ENFYDWFVRQVSAAA(ETAG)AA | | | | | | | |
| 452 | G3 | MBP . . . NNNNLGIEGRISEFIEGRAQPAMA | 2145 | 1 | | 1 | 0.15 | 48.8 | 7.8 × 10⁻⁷ |
| | | RGGGTFYEWFESALRKHGAGAAA(ETAG)AA | | | | | | | |
| 463 | H2C-3aa-H2C | MBP . . . NNNNLGIEGRISEFIEGRAQPAMA | 2146 | 1-1 | A-A | 1-1 | 1.8 | 50.1 | 9.6 × 10⁻⁷ |
| | | FHENFYDWFVRQVSGGSFHENFYDWFVRQVSMA | | | | | | | |
| | | (ETAG)AA | | | | | | | |
| 464 | LF-H2C | MBP . . . NNNNLGIEGRISEFIEGRDYKDDD | 2147 | 1 | | 1 | 0.045 | 48.4 | 3.9 × 10⁻⁸ |
| | | DKFHENFYDWFVRQVSAA(ETAG)AA | | | | | | | |
| 446 | LF-F8 | MBP . . . NNNNLGIEGRISEFIEGRDYKDDD | 2148 | 1 | | 2 | 1.9 | 49.1 | 7.7 × 10⁻⁷ |
| | | DKHLCVLEELFWGASLFGYCSGAAA(ETAG)AA | | | | | | | |
| 459 | SF-RB6 | MBP . . . NNNNLGIEGRISEFGSADYKDLDA | 2149 | 3 | | 1 | 0.069 | 48.1 | 7.7 × 10⁻⁸ |
| | | LDRLMRYFEERPSLAAA(ETAG)AA | | | | | | | |
| MBP* | IacZ | ** | | na | | | 5.1 | 50 | >1 × 10⁻⁵ |

*MBP (negative control for the fusions) is fused to a small fragment of beta-galactosidase (lacZ);
**MBP-lacZ fusion protein was derived from the plasmid pMal-c2 as purchased form NEB.
Fus. = fusion;
Act. = activity;
Conc. = concentration;
N = Antagonist;
A = Agonist;
LF = Long FLAG ® epitope (DYKODDOK; SEQ ID NO:1777);
SF = Short FLAG ® epitope (DYKD; SEQ ID NO:1545);
na = not applicable;
Form. = formula;
All dimers are linked C-N;
Linker sequences are underlined.

TABLE 11

| | | | | | | High | |
|---|---|---|---|---|---|---|---|
| | | | SEQ | | | conc. | Kd |
| Fu- | Monomer/ | | ID | | Site | tested | (HIR) |
| sion | Linker | Sequence | NO: | Form. | IR | (μM) | μM |
| 431− | H2C-6aa-F8 | MBP . . . NNNNLGIEGRISEFIEGRDYKDDDKFHENFYDWFVRQVSGGSGGSHL | 2150 | 1-6 | 1-2 | 0.2 | 0.033 |
| | | CVLEELFWGASLFGYCSGAAA(ETAG)AA | | | | | |
| 431+ | H2C-6aa-F8 | DYKDDDKFHENFYDWFVRQVSGGSGGSHLCVLEELFWGASLFGYCSGAAA(ETAG)A | 2151 | 1-6 | 1-2 | 0.2 | 0.0074 |
| | | A | | | | | |
| 432− | H2C-12aa-F8 | MBP . . . NNNNLGIEGRISEFIEGRDYKDDDKFHENFYDWFVRQVSGGSGGSGG | 2152 | 1-6 | 1-2 | 0.2 | 0.02 |
| | | SGGSHLCVLEELFWGASLFGYCSGAAA(ETAG)AA | | | | | |
| 432+ | H2C-12aa-F8 | DYKDDDKFHENFYDWFVRQVSGGSGGSGGSGGSHLCVLEELFWGASLFGYCSGAAA | 2153 | 1-6 | 1-2 | 0.2 | 0.0038 |
| | | (ETAG)AA | | | | | |
| 433− | H2C-9aa-F8 | MBP . . . NNNNLGIEGRISEFIEGRDYKDDDKFHENFYDWFVRQVSGGSGGSGG | 2154 | 1-6 | 1-2 | 0.2 | 0.03 |
| | | SHLCVLEELFWGASLFGYCSGAAA(ETAG)AA | | | | | |
| 433+ | H2C-9aa-F8 | DYKDDDK FHENFYDWFVRQVSGGSGGSGGS | 2155 | 1-6 | 1-2 | 0.2 | 0.004 |
| | | HLCVLEELFWGASLFGYCSGAAA(ETAG)AA | | | | | |

The concentrations of these fusions vary depending on the expression quality. There are 2 sets of each fusion: uncleaved (−) and cleaved with factor Xa (+). The fusion proteins are in Tris buffer (20 mM Tris, 200 mM NaCl, 1 mM EDTA, 50 mM maltose, pH 7.5) and the cleaved fusions (+) are in the same Tris buffer (500 μl) + 12 μg Factor Xa. (Source of Factor Xa: New England Biolabs). Conc. = concentration; Form. = formula; All dimers are linked C—N; Linker sequences are underlined.

[0397] E. BIAcore Analysis

[0398] For BIAcore analysis of fusion protein and synthetic peptide binding to insulin receptor, insulin (50 μg/ml in 10 mM sodium acetate buffer pH 5) was immobilized on the CM5 sensor chip (Flowcell-2) by amine coupling. Flowcell-1 was used for background binding to correct for any non-specific binding. Insulin receptor (450 nM) was injected into the flow cell and the binding of IR to insulin was measured in resonance units (RUs). Receptor bound to insulin gave a reading of 220 RU. The surface was regenerated with 25 mM NaOH. Pre-incubation of receptor with insulin in a tube at RT completely abrogated the response units to 16 RU. Thus, the system was validated for competition studies. Several maltose-binding fusion proteins, peptides, and rVabs were pre-incubated with insulin receptor before injecting over the insulin chip for competition studies. The decrease in binding/resonance units indicates that several MBP-fusion proteins can block the insulin-binding site. The results are shown in Tables 12 and 13. The amino acid sequences referred to in the tables are identified in FIGS. 8 and 9A-9B, except the 447 and 2A9 sequences, which are shown below.

TABLE 12

BIAcore Results-Fusion Proteins Compete for
Binding to IR

| | | |
|---|---|---|
| | Result | |
| Incubation Mixtures | (RUs) | Sequence Type |

| | | | |
|---|---|---|---|
| Controls | Insulin Receptor | 220 | Positive Control |
| | (IR) 450 nM | | |
| | Insulin (8.7 μM) | 16 | Negative Control |
| MBP Fus. | A7 (20A4)-MBP | 43 | Formula 6 Motif |
| Prots. | (4.1 μM) + IR | | |
| | D8-MBP | 56 | Formula 6 Motif |
| | (1.6 μM) + IR | | |
| | D10-MBP | 81 | Formula 11 Motif |
| | (3.4 μM) + IR | | |
| | 447-MBP | 195 | hGH Pept. Fus. |
| | (11.5 μM) + IR | | |
| | MBP (13 μM) + IR | 209 | Negative Control |

The A7 (20A4), D8, and D10 peptide sequence are shown in FIGS. 8 and 9A-9B. The 447 peptide sequence is: LCQRLGVGWPGWLSGWCA(SEQ ID NO: 2156).

TABLE 13

BIAcore Results-Synthetic peptides compete for
binding to IR

| | | | |
|---|---|---|---|
| Incubation | % | Result | |
| Mix | Binding | (RUs) | Sequence Type |

| | | | |
|---|---|---|---|
| IR | 100 | 128 | Positive control |
| IR + 20D1 | 41 | 51.8 | Formula 1 Motif |
| IR + D8 | 33 | 41.6 | Formula 6 Motif |
| IR + 20C11 | 38 | 49 | Formula 2 Motif |
| | | | (bkg high) |
| IR + H2 | 27 | 34.6 | IGF (phosphorylated |
| | | | band) |
| IR + 2A9 | 100 | 128 | IGF(bkg high) |
| IR + 20A4 | 33 | 41.8 | Formula 6 Motif |
| IR + p53wt | 97 | 124.5 | P53 wild type |

The concentration of each peptide was about 40 μM and the concentration of IR was 450 nM. The 20D1, 20A4, and D8 peptide sequences are shown in FIGS. 8 and 9A-9B. The remaining peptide sequences are as follows:
447 = LCQRLGVGWPGWLSGWCA (SEQ ID NO: 2156);
2A9 = LCQSWGVRIGWLTGLCP (SEQ ID NO: 2157);
20C11 = DRAFYNGLRDLVGAVYGAWD (SEQ ID NO: 1659);
H2 = VTFTSAVFHENFYDWFVRQVS (SEQ ID NO: 1784).

[0399] Regarding preparation of a Site 1 agonist comprising two D117 (H2C) peptides, a linker of only 3 amino acids (12 Å) provided a ligand of greater affinity for Site 1 of IR than a corresponding ligand prepared with a 9 amino acid (36 Å) linking region (FIG. 29).

[0400] F. Stimulation of Autophosphorylation of IR by MBP-Fusion Peptides

[0401] MBP fusion peptides were prepared as described above, and then assayed for autophosphorylation of a insulin receptor construct transfected into 32D cells (Wang et al., 1993; clone 969) (see Example, above). The results of these experiments shown in FIG. 30 indicate that the H2C monomer and H2C-H2C homodimer peptides stimulate autophosphorylation of IR in vivo. H2C dimer peptides (Site 1-Site 1) with a 6 amino acid linker (H2C-6aa-H2C) were most active in the autophosphorylation assay. Other active dimer peptides are also shown in FIG. 30, particularly H2C-9aa-H2C, H2C-12aa-H2C, H2C-3aa-H2C, and F8.

[0402] G. Insulin Receptor Binding Affinity and Fat Cell Potency of MBP-Fusion Peptides

[0403] Results of assays to determine binding affinity for insulin receptor and fat cell potency of the MBP-fusion peptides are shown in Table 14, below.

TABLE 14

| | SEQ | | | | | |
|---|---|---|---|---|---|---|
| | ID | | Site | | HIR Kd | |
| Peptide | NO: | Formula | IR | Sequence | (mol/l) | FFC |
| RB426 | 2158 | F6 | 2 | MBP . . . NNNNLGIEGRISEFIEGR AQPAMA WLDQEWAWVQCEVYGRGCPS AAA(ETAG)AA | 1.4*10⁻⁶ | |
| RB429 | 2159 | F6-F6 | 2-2 | MBP . . . NNNNLGIEGRISEFIEGRAQPAMAWLDQEWAWVQCEVYGRGCPSGGSGGSKWLDQEWAWVQCEVYGRGCPSAAA(ETAG)AA | 1.3*10⁻⁶ | |
| RB505M | 2160 | F4 | 2 | MBP . . . NNNNLGIEGRISEFIEGRDYKDDDDK HLCVLEELFWGASLFGYCSGAAA(ETAG)AA | | |
| RB517M | 2161 | F4-F4 | 2-2 | MBP . . . NNNNLGIEGRISEFIEGRDYKDDDDK HLCVLEELFWGASLFGYCSGGGSGGS HLCVLEELFWGASLFGYCSGAAA(ETAG)AA | | |
| RB515 | 2162 | F4-F4 | 2-2 | MBP . . . NNNNLGIEGRISEFIEGRDYKDDDDK HLCVLEELFWGASLFGYCSGGGSGGSGGSGGS | | |
| | | | | HLCVLEELFWGASLFGYCSGAAA(ETAG)AA | | |
| RB510 | 2163 | F4-F4-F4 | 2-2-2 | MBP . . . NNNNLGIEGRISEFIEGRDYKDDDDK HLCVLEELFWGASLFGYCSGGGSGGS HLCVLEELFWGASLFGYCSGGGSGGS | | |
| | | | | HLCVLEELFWGASLFGYCSGAAA(ETAG)AA | | |
| RB437 | 2164 | F1 | 1 | MBP . . . NNNNLGIEGRISEFIEGRAQPAMA FHENFYDWFVRQVSAAA(ETAG)AA | 8.3*10⁻⁶ | |
| RB463 | 2165 | F1-F1 | 1-1 | MBP . . . NNNNLGIEGRISEFIEGRAQPAMAFHENFYDWFVRQVSGGSFHENFYDWFVRQVSAAA(ETAG)AA | 9.6*10⁻⁷ | |
| RB439 | 2166 | F1-F1 | 1-1 | MBP . . . NNNNLGIEGRISEFIEGRAQPAMA FHENFYDWFVRQVSGGSGGSFHENFYDWFVRQVS-ETAG | 5.5*10⁻⁷ | |
| RB436 | 2167 | F1-F1 | 1-1 | MBP . . . NNNNLGIEGRISEFIEGRAQPAMAFHENFYDWFVRQVSGGSGGSGGSFHENFYDWFVRQVSAAA(ETAG)AA | 4.1*10⁻⁷ | |
| RB449 | 2168 | F1-F1 | 1-1 | MBP . . . NNNNLGIEGRISEFIEGR AQPAMAFHENFYDWFVRQVSGGSGGSGGSGGS AQPAMAFHENFYDWFVRQVSAAA(ETAG)AA | 6.2*10⁻⁷ | |
| RB435 | 2169 | F1-F1-F1 | 1-1-1 | MBP . . . NNNNLGIEGRISEFIEGRAQPAMAFHENFYDWFVRQVSGGSFHENFYDWFVRQVSGGSFHENFYDWFVRQVSAAA(ETAG)AA | 2.0*10⁻⁶ | |
| RB502 | 2170 | F1 | 1 | MBP . . . NNNNLGIEGRISEFIEGRDYKDDDDK VRVDWLQRNANFYDWFVAELVAAA(ETAG)AA | | |
| RB508M | 2171 | F1-F1 | 1-1 | MBP . . . NNNNLGIEGRISEFIEGRDYKDDDDKVRVDWLQRNANFYDWFVAELGGGSGGSGRVDWLQRNANFYDWFVAELGAAA(ETAG)A | | |
| | | | | A | | |
| RB509M | 2172 | F1-F1 | 1-1 | MBP . . . NNNNLGIEGRISEFIEGRDYKDDDDKVRVDWLQRNANFYAWFVAELGGGSGGSGGSGGSGRVDWLQRNANFYDWFVAELGAA | | |
| | | | | A(ETAG)AA | | |
| RB452 | 2173 | F1 | 1 | MBP . . . NNNNLGIEGRISEFIEGRAQPAMARGGGTFYEWFESALRKHGAGAAA(ETAG)AA | 7.8*10⁻⁷ | |
| RB427 | 2174 | F1-F1 | 1-1 | MBP . . . NNNNLGIEGRISEFIEGRAQPAMARGGGTFYEWFESTLRKHGAGGGSGGSRGGGTFYEWFESALRKHGAGAAA(ETAG)AA | 3.3*10⁻⁶ | |
| RB434 | 2175 | F1-F1 | 1-1 | MBP . . . NNNNLGIEGRISEFIEVRAQPAMA | 3.2*10⁻⁶ | |
| | | | | RGGGTFYEWFESALRKHGAGGGSGGSGGSGGSRGGGTFYEWFESALRKHGAGAAA(ETAG)AA | | |
| RB513 | 2176 | F1 | 1 | MBP . . . NNNNLGIEGRISEFIEGRDYKDDDDKGSLDESFYDWFERQLGKKAA(ETAG)AA | | |
| RB516 | 2177 | F1-F1 | 1-1 | MBP . . . NNNNLGIEGRISEFIEGRDYKDDDDKGSLDESFYDWFERQLGKKGGSGGSGSLDESFYDWFERQLGKKAAA(ETAG)AA | | |
| RB512 | 2178 | F1-F1 | 1-1 | MBP | | |
| | | | | . . . NNNNLGIEGRISEFIEGRDYKDDDDKGSLDESFYDWFERQLGKKGGSGGSGGSGGSGSLDESFYDWFERQLGKKAAA(ETAG)AA | | |
| RB464 | 2179 | F1 | 1 | MBP . . . NNNNLGIEGRISEFIEGRDYKDDDDK FHENFYDWFVRQVSAA(ETAG)AA | 3.8*10⁻¹⁸ | |
| RB446 | 2180 | F4 | 2 | MBP . . . NNNNLGIEGRISEFIEGRDYKDDDDKHLCVLEELFWGASLFGYCSGAAA(ETAG)AA | 7.7*10⁻⁷ | |
| RB459 | 2181 | F3 | 1 | MBP . . . NNNNLGIEGRISEFGSADYKDLDALDRLMRYFEERPSLAAA(ETAG)AA | 7.7*10⁻⁸ | |
| RB430 | 2182 | F1-F3 | 1-1 | MBP . . . NNNNLGIEGRISEFIEGRDYKDDDDKFHENFYDWFVRQVSGGSGGS LDALDRLMRYFEERPSLETAG | 2.1*10⁻⁶ | − |
| RB430 | 2183 | F1-F3 | 1-1 | cleaved DYKDDDKFHENFYDWFVRQVSGSGSLDALDRLMRYFEERPSLAAA(ETAG)AA | ~4*10⁻⁹ | |
| RB431 | 2184 | F1-F4 | 1-2 | MBP . . . NNNNLGIEGRISEFIEGRDYKDDDKFHENFYDWFVRQVSGGSGGS HLCVLEELFWGASLFGYCSGAAA(ETAG)AA | 4.710⁻⁸ | − |
| RB431 | 2185 | F1-F4 | 1-2 | cleaved DYKDDDKFHENFYDWFVRQVSGGSGGSHLCVLEELFWGASLFGYCSGAAA(ETAG)AA | ~8*10⁻⁹ | |
| RB432 | 2186 | F1-F4 | 1-2 | MBP-NNNNLGIEGRISEFIEGRDYKDDDKFHENFYDWFVRQVSGGSGGSGGSGGS HLCVLEELFWGASLFGYCSGAAA(ETAG)AA | 3.5*10⁻⁸ | − |
| RB432 | 2187 | F1-F4 | 1-2 | cleaved DYKDDDKFHENFYDWFVRQVSGGSGGSGGSGGSHLCVLEELFWGASLFGYCSGAAA(ETAG)AA | ~6*10⁻⁹ | |
| RB433 | 2188 | F1-F4 | 1-2 | MBP . . . NNNNLGIEGRISEFIEGRDYKDDDK FHENFYDWFVRQVSGGSGGSGGS HLCVLEELFWGASLFGYCSGAAA(ETAG)AA | 2.1*10⁻⁸ | |
| RB508 | 2189 | F1-F1 | 1-1 | DYKDDDDKVRVDWLQRNANFYDWFVAELGGGSGGSGRVDWLQRNANFYDWFVAELGAAAGAPVPYPDPLEPRSA | 1.5*10⁻⁷ | ++ |
| RB509 | 2190 | F1-F1 | 1-1 | DYKDDDDKVRVDWLQRNANFYAWFVAELGGGSGGSGGSGGSGRVDWLQRNANFYDWFVAELGAAAGAPVPYPDPLEPRAA | 5.5*10⁻⁸ | ++ |
| RB505 | 2191 | F4 | 2 | DYKDDDDKHLCVLEELFWGASLFGYCSGAAA(ETAG)AA | 4.8*10⁻⁷ | − |
| RB517 | 2192 | F4-F4 | 2-2 | DYKDDDDKHLCVLEELFWGASLFGYCSGGGSGGSHLCVLEELFWGASLFGYCSGAAA(ETAG)AA | 6.0*10⁻⁶ | − |
| RB521 | 2193 | F1-F1 | 1-1 | MADYKDDDDKGSLDESFYDWFERQLGKKGGSGGSGSLDESFYDWFERQLGKKAAA(ETAG)PG | 4.4*10⁻⁸ | +++++ |
| RB535 | 2194 | F1-F1 | 1-1 | MADYKDDDDKGSLDESFYDWFERQLGKKGGSGGSGGSGGSGSLDESFYDWFERQLGKKAAA(ETAG)PG | ~1.0*10⁻⁷ | +++++ |
| RB540 | 2195 | F6 | 2 | MADYKDDDDKWLDQEWAWVQCEVYGRGCPSAAA(ETAG)PG | ~1.0*10⁻⁷ | |
| RB539 | 2196 | F6-F1 | 2-1 | MADYKDDDDKWLDQEWAWVQCEVYGRGCPSGGSGGSGSLDESFYDWFERQLGKKAAA(ETAG)PG | 7*10⁻⁰ | ++++ |
| RB537 | 2197 | F1-F6 | 1-2 | MADYKDDDDKGSLDESFYDWFERQLGKKGGSGGSWLDQEWAWVQCEVYGRGCPSAAA(ETAG)PG | 5.9*10⁻¹¹ | − |
| RB538 | 2198 | F1-F6 | 1-2 | MADYKDDDDKGSLDESFYDWFERQLGKKGGSGGSGGSGGSWLDQEWAWVQCEVYGRGCPSAAA(ETAG)PG | 1.7*10⁻¹¹ | − |
| RB626 | 2199 | F6-F1 | 2-1 | MADYKDEIEAEWGRVRCLVYGRCVGGGGSGGSGGSGGSGSLDESFYDWFERQLGKKAAA(ETAG)PG | 3.0*10⁻¹⁰ | +++ |
| RB625 | 2200 | F6-F1 | 2-1 | MADYKDDDDKWLDQEWAWVQCEVYGRGCPSQPPPPDITTHRADPQGSLDESFYDWFERQLGKKAAA(ETAG)PG | 3.8*10⁻¹⁰ | +++++ |
| RB622 | 2201 | F6-F1 | 2-1 | MADYKDDDDKWLDQEWAWVQCEVYGRGCPSTPKPPTPPPLSADGSLDESFYDWFERQLGKKAAA(ETAG)PG | 1.0*10⁻⁹ | ++++ |
| RB596 | 2202 | F1 | 1 | MQNDDGSLDESFYDWFERQLGHHHHHHPG | 9.4*10⁻⁸ | |
| RB569 | 2203 | F1 | 1 | MGSLDESFYDWFERQLGEEEGGDHHHHHHPG | 2.1*10⁻⁷ | |
| RB570 | 2204 | F1 | 1 | MQNDDGSLDESFYDWFERQLGEEEGGDHHHHHHPG | 2.5*10⁻⁸ | |

ETAG = GAPVPYPDPLEPR(SEQ ID NO: 2205); MBP . . . NNNNL = fusion junction to MBP at c-terminus of MBP; All dimers are linked C—N.

### Example 9

### In Vivo Assays for Insulin Agonists

[0404] To test the in vivo activity of dimer peptide S519, an intravenous blood glucose test was carried out on Wistar rats. Male Mol:Wistar rats, weighing about 300 g, were divided into two groups. A 10 μl sample of blood was taken from the tail vein for determination of blood glucose concentration. The rats were anaesthetized with Hypnorm/Dormicum at t=−30 min and blood glucose was measured again at t=−20 min and at t=0 min. After the t=0 sample was taken, the rats were injected into the tail vein with vehicle or test substance in an isotonic aqueous buffer at a concentration corresponding to a 1 ml/kg volume of injection. Blood glucose was measured at times 10, 20, 30, 40, 60, 80, 120, and 180 min. The Hypnorm/Dormicum administration was repeated at 20 min intervals. Results shown in FIG. 33 demonstrate that the S519 (at 20 nmol/kg) peptide lowered blood glucose levels similar to levels observed for human insulin (at 2.5 nmol/kg) (n=8). The S519 peptide and human insulin showed comparable in vivo effects, both in magnitude and onset of response (FIG. 33).

### Example 10

### IGF-1 Binding Peptides

[0405] Three major groups of peptide IGF-1-binding peptides were obtained from IGF-1R panning experiments: Site 1 A6 (FyxWF) (SEQ ID NO:1596); Site 1 B6 (FyxxLxxL) (SEQ ID NO:1732), and Site 2 (cysteine loops). See Beasley et al. International Application PCT/US00/08528, filed Mar. 29, 2000, and Beasley et al., U.S. application Ser. No. 09/538,038, filed Mar. 29, 2000. Active peptides included 20E2 and RP6 (B6-like; Formula 2), S175 (A6-like; Formula 1), G33 (A6-like; Formula 1), RP9 (A6-like; Formula 1), D815 (Site 2), and D8B12 (Site 2) peptides. The IGF-1 binding peptides were analyzed by various assays, described as follows.

[0406] A. Phage Competition

[0407] Phage competition studies were performed with Site 1 (RP9) and Site 2 (D815) monomer peptides. Plates were coated with IGF-1R (100 ng/well in carbonate buffer, pH 9.6) overnight at 4° C. Wells were blocked with 4% non-fat milk in PBS for 60 min at room temperature. One hundred microliters of rescued phage were added to each well. Peptides in varying concentrations were added and the mixtures were incubated for 2 h at room temperature. Plates were washed three times with PBS and 100 μl of anti-M13 antibody conjugated to horseradish peroxidase was added to each well. The labeled antibody was incubated at room temperature for 60 min. After washing, 100 μl of ABTS was added per well and the plates read in a microtiter reader at 450 nM.

[0408] Phage included RP9 (A6-like; Formula 1); RP6 (B6-like; Formula 2); D8B12 (Site 2); and D815 (Site 2). Peptides included RP9 and D815.

| | | Site | | SEQ |
|---|---|---|---|---|
| Pep- | | IGF- | | ID |
| tide | Formula | 1R | Sequence | NO: |
| D8B12 | 6 | 2 | WLEQERAWIWCEIQGSGCRA | 1884 |
| D815 | 6 | 2 | WLDQERAWLWCEISGRGCLS | 2206 |
| RP6 | 2 | 1 | TFYSCLASLLTGTPQPNRGPWERCR | 1635 |
| RP9 | 1 | 1 | GSLDESFYDWFERQLG | 1559 |

[0409] Results shown in FIGS. 34A-34E demonstrate that that RP9 and D815 peptides competed both Site 1 and Site 2 phage. These results illustrate the allosteric nature of the interaction with IGF-1R.

[0410] Phage competition studies were also performed with Site 2-Site 1 dimer peptides containing 6- or 12-amino acid linkers. Plates were coated with IGF-1R (100 ng/well in carbonate buffer, pH 9.6) overnight at 4° C. Wells were blocked with 4% non-fat milk in PBS for 60 min at room temperature. One hundred microliters of rescued phage were added to each well. Peptides in varying concentrations were added and the mixture incubated for 2 h at room temperature. Plates were washed three times with PBS and 100 μl of anti-M13 antibody conjugated to horseradish peroxidase was added to each well. The labeled antibody was incubated for 60 min at room temperature. After washing, 100 μl of ABTS was added per well and the plates read in a microtiter reader at 450 nM. Phage included RP9, RP6, D8B12, and D815. Peptides included D815-6L-RP9 and D815-12L-RP9. Linker sequences are underlined and shown below.

| | | Site | | SEQ ID |
|---|---|---|---|---|
| Peptide | Formula | IGF-1R | Sequence | NO: |
| D815-6L- | 6-1 | 2-1 | LDQERAWLWCEISGRGCLSGGSGGSGSLDESFYDWFERQLGKK | 2207 |
| RP9 | | | | |
| D815- | 6-1 | 2-1 | WLDQERAWLWCEISGRGCLSGGSGGSGGSGGSGSLDESFYDW | 2208 |
| 12L-RP9 | | | FERQLGKK | |

[0411] D8B12, D815, RP6, and RP9 amino acid sequences are shown in the previous section. Results shown in FIGS. 35A-35E demonstrate that dimers competed both Site 1 and Site 2 phage. This indicates that both dimer units were active at IGF-1R.

[0412] B. IGF-1 Proliferation Assays FDC-P2 cells expressing the IL-3 and human IGF-1R receptors were grown in RPMIk-1640 medium supplemented with 15% fetal bovine serum (FBS) and 5% WEHI conditioned medium (containing IL-3) in accordance with routine methods. Prior to an experiment, the cells were pelleted and washed two times in PBS. Following this, cells were resuspended in RPMI-1640 medium with 2% FBS and added to a 96-well plate at a concentration of 2×10⁴ cells/well in 75 μl. This was designated as the cell plate.

[0413] Peptides were suspended in PPMI-15% FBS (test medium). For the agonist assay, medium was added to rows 2-12 of a 96-well plate. The peptide was added to row 1 in 200 μl of test medium at a final concentration of 60 μM. The peptide was serially diluted (1:1) across rows 2-11. No peptide was added to row 12 (control; cells without IGF-1). For the antagonist assay, test medium containing 10 ng/ml IGF-1 (ED₅₀ test medium) was added to all wells of a 96-well plate. To row 1 was added 100 μl of peptide in ED₅₀ test medium at a concentration of 120 μM. The peptide was serially diluted (1:1) across rows 2-11. No peptide was added to row 12 (control; cells with IGF-1).

[0414] For both agonist and antagonist assays, 75 μl from the working plates was transferred to the appropriate rows in comparable cell plates. The starting peptide concentration for both agonist and antagonist assays was 30 μM. Each peptide was done in duplicate. Plates were incubated at 37° C. for 45-48 h. Ten microliters of WST-1 (Cell Proliferation Reagent, Roche cat #1 644 807) were added to each well and the plates were read in an ELISA reader (440/700 dual wavelength) each hour for 4 h. Graphs were prepared from the raw data using Sigma Plot. Peptides included:

| | | Site | | SEQ |
|---|---|---|---|---|
| Pep- | | IGF- | | ID |
| tide | Formula | 1R | Sequence | NO: |
| 20E2 | 2 | 1 | DYKDFYDAIDQLVRGSARAGGTRD | 2209 |
| D815 | 6 | 2 | WLDQERAWLWCEISGRGCLS | 2206 |
| G33 | 1 | 1 | GIISQSCPESFYDWFAGQVSDPWWCW | 1600 |
| RP6 | 2 | 1 | TFYSCLASLLTGTPQPNRGPWERCR | 1635 |
| RP9 | 1 | 1 | GSLDESFYDWFERQLG | 1559 |
| S175 | 1 | 1 | GRVDWLQRNANFYDWFVAELG | 1560 |

[0415] Results of the IGF-1 proliferation assays are shown in FIGS. 36-42. FIG. 36 demonstrates that that peptides G33 (Site 1; ED₅₀˜10 μM) and D815 (Site 2; ED₅₀˜2 μM) showed agonist activity at IGF-1R, whereas peptides RP9 and RP6 showed no agonist activity. FIG. 37 demonstrates that that peptides RP6 (Site 1; ED₅₀˜1 μM) and RP9 (Site 1; ED₅₀˜7 μM) showed antagonist activity at IGF-1R, whereas peptides G33 and D815 showed no antagonist activity. FIG. 38 demonstrates that peptides S175 and 20E2 exhibited weak agonist activity at IGF-1R (ED₅₀>10 μM). FIG. 39 shows that D815-RP9 dimers with 6- or 12-amino acid linkers acted as agonists at IGF-1R. FIG. 40 shows that dimer peptide D815-6-G33 was inactive as an agonist at IGF-1R. FIG. 41 shows that monomer peptide RP6 acted as an antagonist at IGF-1R. The IGF-1 standard curve determined for FDC-P2 cells is shown in FIG. 42.

[0416] The IGF-1R data for the Site 1 and Site 2 peptides is summarized in Table 15, below.

TABLE 15

| | | | | | | | | | | | |
|---|---|---|---|---|---|---|---|---|---|---|---|
| | | Site | | | SEQ | | | | | | |
| Mon./ | | IGF- | | | ID | nM Ki | nM ED₅₀ | Max | nM IC₅₀ | Ki/ | |
| Dimer | Form. | 1R | Link. | Sequence | NO: | app Kd | Growth | Action | Antag. | ED50 | Class |

| | | | | | | | | | | | |
|---|---|---|---|---|---|---|---|---|---|---|---|
| IGF-1 | | | NA | | | 0.69 | 0.30 | 100 | 2 | 2.3 | A |
| rG33 | 1 | 1 | NA | GIISQSCPESFYDWFAGQVSDPWWCW | 1600 | 1450 | 500 | >50 | — | 2.9 | A |
| rD815 | 6 | 2 | NA | WLDQERAWLWCEISGRGCLS | 2206 | 4080 | 500 | >50% | — | 8.2 | A |
| RP9 | 1 | 1 | NA | GSLDESFYDWFERQLG | 1559 | 417 | — | <10% | 900 | 0.5 | N |
| D815- | 6-1 | 2-1 | 6 aa | WLDQERAWLWCEISGRGCLSGGSGGSGII | 2210 | 624 | — | <10% | nd | | nd |
| G33 | | | | SQSCPESFYDWFAGQVSDPWWCW | | | | | | | |
| D815- | 6-1 | 2-1 | 6 aa | WLDQERAWLWCEISGRGCLSGGSGGSGSL | 2211 | 36 | 50 | >50% | >500 | 0.8 | A |
| RP9 | | | | DESFYDWFERQLGKK | | | | | | | |
| D815- | 6-1 | 2-1 | 12 aa | WLDQERAWLWCEISGRGCLSGGSGGSGGS | 2212 | 3 | 10,000 | 100 | — | 0.0003 | A |
| RP9 | | | | GGSGSLDESFYDWFERQLGKK | | | | | | | |

A = agonists; N = antagonist; nd = not determined; NA = not applicable; Form. = formula; Mon. = monomer; Antag. = antagonism; Link. = linker; Linker sequences are underlined.

### Example 11

### Panning Peptide Libraries for IGF-1 Binding Proteins

[0417] A. Panning Secondary Libraries

[0418] Soluble IGF-1R (“sIGF-1R”) was obtained from R&D Systems. The soluble protein (>95% pure) included the heterotetrameric (alpha 2-beta 2) extracellular domain of IGF-1R isolated from a mouse myeloma cell line. sIGF-1R (500 ng/well) was added to an appropriate number of wells in a 96-well microtiter plate (MaxiSorp plates, NUNC) and incubated overnight at 4° C. Wells were then blocked with MPBS (PBS buffer pH 7.5 containing 2% Carnation® non-fat dry milk) at room temperature (RT) for 1 h. Eight wells were used for each round of panning for the G33 and RP6 secondary libraries. The phage were incubated with MPBS for 30 min at RT, then 100 μl was added to each well.

[0419] For the first round, the input phage titer was 4×10¹³ cfu/ml. For rounds 2 and 3, the input phage titer was approximately 10¹¹ cfu/ml. Phage were allowed to bind for 2 to 3 h at RT. The wells were then quickly washed 13 times with 200 μl/well of MPBS. Bound phage were eluted by incubation with 100 μl/well of 20 mM glycine-HCl, pH 2.2 for 30 s. The resulting solution was then neutralized with Tris-HCl, pH 8.0. Log phase TG1 cells were infected with the eluted phage, then plated onto two 24 cm×24 cm plates containing 2xYT-AG. The plates were incubated at 30° C. overnight. The next morning, cells were removed by scraping and stored in 10% glycerol at −80° C. For subsequent rounds of affinity enrichment, cells from these frozen stocks were grown and phage were prepared as described above. A minimum of 72 clones was picked at random from the second, third, and fourth rounds of panning and screened for binding activity. DNA sequencing of the clones determined the amino acid sequences summarized in FIG. 43A-43B.

[0420] B. Panning Peptide Dimer Libraries

[0421] Microtiter plates were coated and blocked by standard methods, as follows. Plates were coated with sIGF-1R (see Example, above) or soluble IR (Bass construct; Bass et al., 1996, J. Biol. Chem. 271:19367-19375) in 0.2 M NaHCO₃, pH 9.4. One hundred microliters of solution containing either 50 ng IR or IGF-1R (rounds 1 and 2), 25 ng IR or IGF-1R (round 3), or 12.5 ng IR or IGF-1R (round 4) was added to an appropriate number of wells in a 96-well microtiter plate (MaxiSorp plates, Nalge NUNC) and incubated overnight at 4° C. Wells were then blocked with a solution of 2% non-fat milk in PBS (MPBS) at RT for at least 1 h.

[0422] Eight wells coated with IR or IGF-1R were used for each round of panning. One hundred microliters of phage were added to each well. For the first round, the input phage titer was 3×10¹³ cfu/ml. For subsequent rounds, the input phage titer was approximately 10¹² cfu/ml. Phage were incubated for 2-3 h at RT. The wells were then quickly washed 13 times with 300 μl/well of PBS. Bound phage were eluted by incubation with 150 μl/well of 50 mM glycine-HCl, pH 2.0 for 15 min. The resulting solution was pooled and then neutralized with Tris-HCl, pH 8.0. Log phase TG1 cells were infected with the eluted phage, in 2xYT medium for 1 h at 37° C. prior to the addition of helper phage, ampicillin, and glucose (2% final concentration).

[0423] After incubation for 1 h at 37° C., the cells were spun down and resuspended in 2xYT-AK medium. The cells were then returned to the shaker and incubated overnight at 37° C. Phage amplified overnight were then precipitated and subjected to the next round of panning. A total of 96 clones were picked at random from rounds 3 and 4 and screened for binding activity. Several clones from each pan were further tested for binding to IR or IGF-1R in phage ELISA by competition with soluble peptides as described in Beasley et al. International Application PCT/US00/08528, filed Mar. 29, 2000, and Beasley et al., U.S. application Ser. No. 09/538,038, filed Mar. 29, 2000. Competition was performed by addition of 5 μl of RP9 peptide, recombinant D8 peptide, or both per well, followed by addition of 100 μl of phage per well. Representative peptides are shown in FIGS. 44A-44B and in Table 16, below.

TABLE 16

| | SEQ ID | | Site | | |
|---|---|---|---|---|---|
| Pep. | NO: | Form. | IR | Sequence | Description |
| RP27 | 2213 | 6-1 | 2-1 | GLDQEQAWVECEVYGRGCPYGSLDESFYDWFERQLG | No linker |
| RP28 | 2214 | 6-1 | 2-1 | RLEEEWAWVQCEVYGRGCPSGGSGGSGSLDESFYDWFERQLG | EEE Stretch in D8 |
| RP29 | 2215 | 6-1 | 2-1 | SLDREWACVKCEVYGRGCPCGGSGGSGSLDESFYDWFERQLG | Repeat isolate |
| RP30 | 2216 | 6-1 | 2-1 | SLEEEWAQVECEVYGRGCPSGGSGGSGSLDESFYDWFERQLG | D8 by design |
| RP31 | 2217 | 6-1 | 2-1 | SLEEEWAQVECEVYGRGCPSGGSGGSGLLDESFYHWFDRQLR | D8 & RP9 by design |
| RP32 | 2218 | 6-1 | 2-1 | SIEEEWAQIKCDVWGRGCPPGGSGGSGLLDESFYHWFDRQLR | D8 & RP9 by design |
| RP33 | 2219 | 6-1 | 2-1 | QLDLEWAWVQCEVYGRGCGGSGSLDESFYDWFERQLG | 3 amino acid linker |
| RP34 | 2220 | 6-1 | 2-1 | QLDEEWAGVQCEVYGRGCSLDESFYDWFERQLG | No linker |
| RP35 | 2221 | 6-1 | 2-1 | RLEEEWRWVQCEVYGRGCAAGGSGGSGSLDESFYDWFERQLG | EEE Stretch in D8 |
| RP36 | 2222 | 6-10 | 2-1 | SLDQEWAWVQCEVYGRGCPSGGSGGSDSDWAGYEWFEEQLD | D8 (W1 −> S)- Group 6 |
| | | | | | by design |

Pep. = peptide; Form. = formula; Linker sequences are shown in bold and underlined; All dimers are linked C—N

[0424] C. Determination of Amino Acid Preferences

[0425] For both monomer and dimer peptides, amino acid preferences for each peptide were determined as follows. The expected frequency of each of the 20 amino acids at that position was calculated based on codon usage and % doping for that library. This was then compared to the actual frequency of occurrence of each amino acid at every position after four rounds of biopanning. Any amino acid that occurred at a frequency >2-fold was considered preferred. Most preferred amino acid(s) were those that have the greatest fold enrichment after panning. Preferred amino acid sequences for RP9, D8, and Formula 10 (Group 6) peptides are shown below.

TABLE 17

| | | |
|---|---|---|
| Peptide | Sequence | SEQ ID NO: |

| | | |
|---|---|---|
| RP9 | GSLDESFYDWFERQLG | 1559 |
| Regular | GLADEDFYEWFERQLR | 2223 |
| | L | |
| w/ Peptide | GQLDEDFYEWFDRQLS | 2224 |
| | A | |
| w/ Insulin | GFMDESFYEWFERQLR | 2225 |
| | W A | |

[0426] Table 17 shows preferred amino acid sequences for RP9 peptides. Residues in bold indicate strong preference; underlined residues indicate positions where more than one amino acid preference is seen. The first column indicates the conditions used for the panning procedure. “RP9” indicates sequence of the parent RP9; “Regular” indicates regular pan as described in methods for panning of random libraries; “w/ peptide” indicates panning in the presence of 2 nM RP9 peptide; “w/ insulin” indicates panning in the presence of 2 nM insulin.

TABLE 18

| | | SEQ ID |
|---|---|---|
| Peptide | Sequence | NO: |
| D8 Parent: | WLDQEWAWVQCEVYGRGCPS | 2129 |
| Dimer Consensus | sLEEEWaQIECEVY/WGRGCps | 2226 |
| Monomer Consensus | sLEEEWaQIqCEIY/WGRGCry | 1548 |
| | W | |

[0427] Table 18 shows preferred amino acid sequences for D8 peptides. Upper case residues in bold indicate strong preference (>90% frequency); upper case letters, non-bold, indicate some preference (5-15% higher frequency than expected); lower case letters indicate less preference (2-5% higher frequency than expected); similar preferences seen in D8 in both monomer and dimer libraries. The underlined Y/W indicates that both residues are equally preferred at that position. In the original D8 sequence that position is occupied by Y.

TABLE 19

| | | | SEQ ID |
|---|---|---|---|
| Peptide | Sequence | Type | NO: |
| Group 6 | W(A/E)GYEW(F/L) | preferred core | 1549 |
| Group 6 | DSDWAGYEWFEEQLD | preferred sequence | 1595 |

[0428] Table 19 shows preferred amino acid sequences for Group 6 peptides. Underlined residues indicate preferred N-terminal and C-terminal extensions.

### Example 12

### Fluorescence-Based hIGF-1R Binding Assays

[0429] A. Heterogeneous Time-Resolved Fluorometric Assays

[0430] The effect of recombinant peptide G33 (rG33) on the binding of biotinylated-recombinant human IGF-1 (b-rhIGF-1) to recombinant human IGF-1R (rhIGF-1R) was determined using heterogeneous time-resolved fluorometric assays (TRF; DELFIA®, PE Wallac, Inc.). The rhIGF-1R protein included the extracellular domain of the receptor pre-propeptide, up to amino acid residue 932 (A. Ullrich et al., 1986, EMBO J. 5:2503-2512). Duplicate data points were collected at each concentration of competitor and the lines were designed to represent the best fit to a four-parameter non-linear regression analysis (y=min+(max−min)/(1+10̂((log IC₅₀−x)*Hillslope))) of the data, which was used to determine IC₅₀ values.

[0431] The assay was performed using a 96-well clear microplate (NUNC MaxiSorp) with a final volume of 100 μl. Microtiter plates were coated with 0.1 μg rhIGF-1R in 100 μl of NaHCO₃, pH 8.5 buffer, and incubated overnight at room temperature (RT). The plates were washed 3-times with 0.05 M Tris-HCl (pH 8 at 25° C.), 0.138 M NaCl, 0.0027 M KCl (TBS). This was followed by addition of 200 μl blocking buffer (TBS containing 0.05% Bovine Serum Albumin (BSA, Cohn Fraction V)), and incubated for 1 h at RT. The plates were washed 6-times with a 1× solution of Wallac's DELFIA® wash concentrate. Competitor was added in a volume of 50 μl and serially diluted across the microtiter plate in TBS containing 0.05% BSA. Non-specific binding (background) was determined in the presence of 60 μM hIGF-1.

[0432] Fifty microliters of b-rhIGF-1, 10 nM, diluted in TBS containing 0.05% BSA was added. The plates were incubated for 2 h at RT. After incubation, plates were washed 6-times with a 1× solution of Wallac's DELFIA® wash concentrate. Then the plates were treated with 100 μL of Wallac's DELFIA® Assay Buffer containing a 1:1000 dilution of europium-labeled streptavidin and incubated for 2 h at RT. This was followed by washing 6-times with a 1× solution of Wallac's DELFIA® wash concentrate. One hundred microliters of Wallac's DELFIA® enhancer was added, and the plates were shaken for 30 min at RT. After shaking, the fluorescence signal at 620 nm was read on a Victor² 1420 plate reader (PE Wallac, Inc.). Primary data were background corrected, normalized to buffer controls, and then expressed as % specific binding. The Z′-factor was greater than 0.5 (Z′=1−(3σ₊+3σ₋)/|μ₊−μ₋|; Zhang et al., 1999, J. Biomol. Screen. 4:67-73) and the signal-to-background (S/B) ratio was ˜20. The results of these experiments are shown in FIG. 45. The IC₅₀ value calculated for rG33 is shown in Table 20, below.

[0433] The effect of recombinant peptides D815 (rD815), RP9, D815-6aa-G33, D815-6aa-RP9, and D815-12aa-RP9 on the binding of b-rhIGF-1 to rhIGF-1R was determined using the fluorometric assay described above. IGF-1 was used as a control. Duplicate data points were collected at each concentration of competitor and the lines represent the best fit to a four-parameter non-linear regression analysis, which was used to determine IC₅₀ values. Results for rD815 are show in FIG. 46; results for RP9 are shown in FIG. 47; results for D815-6-G33 are shown in FIG. 48; results for D815-6-RP9 are shown in FIG. 49; and results for D815-12-RP9 are shown in FIG. 50; the results for IGF-1 are shown in FIG. 51. The IC₅₀ values for the rD815, RP9, D815-6aa-G33, D815-6aa-RP9, and D815-12aa-RP9 peptides, and IGF-1 are shown in Table 20, below. Linker sequences are underlined.

TABLE 20

| | | SEQ ID | |
|---|---|---|---|
| Competitor | Sequence | NO: | IC₅₀ (M) |
| rG33 | GIISQSCPESFYDWFAGQVSDPWWCW | 1600 | 1.45 × 10⁻⁶ M |
| rD815 | WLDQERAWLWCEISGRGCLS | 2206 | 4.08 × 10⁻⁶ M |
| RP9 | GSLDESFYDWFERQLG | 1559 | 4.17 × 10⁻⁷ M |
| D815-6aa-G33 | WLDQERAWLWCEISGRGCLSGGSGGSGIIS | 2210 | 6.24 × 10⁻⁷ M |
| | QSCPESFYDWFAGQVSDPWWCW | | |
| D815-6aa-RP9 | WLDQERAWLWCEISGRGCLSGGSGGSGSL | 2211 | 3.57 × 10⁻⁸ M |
| | DESFYDWFERQLGKK | | |
| D815-12aa-RP9 | WLDQERAWLWCEISGRGCLSGGSGGSGG | 2212 | 3.22 × 10⁻⁹ M |
| | SGGSGSLDESFYDWFERQLGKK | | |
| IGF-1 | | | 6.85 × 10⁻¹⁰ M |

[0434] The order of potency of all peptides or dimers compared to IGF-1 was determined as: IGF-1>D815-12aa-RP9>>D815-6aa-RP9>RP9≅D815-6aa-G33>rG33>rD815. These results suggest that the coupling of D815 with RP9 using an extended linker (12 versus 6 amino acids) produced a potent competitor that approximates the affinity of IGF-1 for its own receptor.

[0435] B. Time-Resolved Fluorescence Resonance Energy Transfer Assays

[0436] The effect of Site 1 peptides, Site 2 peptides, and rhIGF-1 on the dissociation of biotinylated-20E2 (b-20E2, Site 1) from recombinant human IGF-1R was determined using time-resolved fluorescence resonance energy transfer assays (TR-FRET). Best fit non-linear regression analysis of the data, was used to determine dissociation rate constants. Each data point represents a single observation.

[0437] The assay was performed using a 96-well white microplate (NUNC) with a final volume of 100 μl. Final incubation conditions were 16.5 nM b-20E2, 2.2 nM SA-APC (streptavidin-allophycocyanin), 2.2 nM Eu³⁺-rhIGF-1R (LANCE™ labeled, PE Wallac, Inc.), 0.05 M Tris-HCl (pH 8 at 25° C.), 0.138 M NaCl, 0.0027 M KCl, and 0.1% BSA (Cohn Fraction V). Reactions were allowed to reach equilibrium for 6 h at RT. Following this, various peptides or IGF-1 were added at a final concentration of 100 μM or 30 μM, respectively. The addition of peptides or IGF-1 initiated the measurement of dissociation (Time Zero, sec). The fluorescence signal at 665 nm was read on a Victor² 1420 plate reader (PE Wallac, Inc.) at 30 sec intervals.

[0438] Results of these experiments are shown in FIG. 52. The buffer controls did not vary over the time interval of study, which demonstrated that the equilibrium was not disturbed by the addition of diluent at Time zero. The addition of excess (>1000-fold 20E2 K_{d} for IGF-1R) Site 1 peptides such as H2C, 20E2, or RP6 did not differ depending on specific the peptide used, and the dissociation rates of b-20E2 were similar for these peptides. D8B12 (Site 2 peptide) and IGF-1 (binds both Site 1 and Site 2) did demonstrate significant differences in the rate of dissociation of b-20E2. This would suggest that these agents act as non-competitive or allosteric regulators of Site 1 binding.

[0439] The effect of various peptides or peptide dimers on the binding of biotinylated-20E2 (B-20E2) to recombinant human IGF-1R was determined using TR-FRET assays, described above. For these experiments, each data point represents the average of two replicate wells. The lines represent the best fit to a four-parameter non-linear regression analysis (y=min+(max−min)/(1+10̂((log IC₅₀-x)*Hillslope))) of the data, which was used to determine IC₅₀ values.

[0440] The assays were performed using a 384-well white microplate (NUNC) with a final volume of 30 μl. Final incubation conditions were 15 nM b-20E2, 2 nM SA-APC, 2 nM Eu³⁺-rhIGF-1R (LANCE™ labeled, PE Wallac, Inc.), 0.05 M Tris-HCl (pH 8 at 25° C.), 0.138 M NaCl, 0.0027 M KCl, and 0.1% BSA (Cohn Fraction V). After 16-24 h of incubation at RT, the fluorescence signal at 665 nm and 620 nm was read on a Victor² 1420 plate reader (PE Wallac, Inc.). Primary data were background corrected, normalized to buffer controls, and then expressed as % specific binding. The Z′-factor was greater than 0.5 (Z′=1−(3σ₊+3σ₋)/|μ₊−μ₋|; Zhang et al., 1999, J. Biomol. Screen. 4:67-73) and the signal-to-background (S/B) ratio was ˜4. Results of these experiments are shown in FIG. 53. Table 21, below, shows the IC₅₀ values calculated for these experiments. Notably, the C1 peptide showed IGF-1R affinities of ˜1 nM (FIG. 53) and ˜10 nM (Table 21) in these assays.

TABLE 21

| | | | | | |
|---|---|---|---|---|---|
| | | SEQ ID | | Site | |
| Competitor | Sequence | NO: | Formula | IGF-1R | IC₅₀ (M) |

| | | | | | |
|---|---|---|---|---|---|
| C1 | CWARPCGDAANFYDWFVQQAS | 1550 | 1 | 1 | 8.80E−10 |
| IGF-1 | | | | | 2.93E−09 |
| RP9 | GSLDESFYDWFERQLG | 1559 | 1 | 1 | 3.93E−08 |
| 20E2 | DYKDFYDAIDQLVRGSARAGGTRD | 2209 | 2 | 1 | 1.04E−07 |
| E8 | GGTVWPGYEWLRNA | 2118 | 10 | 2 | 2.53E−07 |
| H2C | FHENFYDWFVQRVSKK | 2117 | 1 | 1 | 4.60E−07 |
| S173 | LDALDRLMRYFEERPSL | 1830 | 3 | 1 | 6.29E−06 |
| D8B12 | WLEQERAWIWCEIQGSGCRA | 1884 | 6 | 2 | 1.13E−05 |
| A6 | SAKNFYDWFVKK | 1551 | 1 | 1 | 3.10E−05 |

[0441] C. Fluorescence Polarization Assays

[0442] The effect of various peptide monomers and dimers on the binding of fluorescein-RP9 (FITC-RP9) to soluble human insulin receptor-immunoglobulin heavy chain chimera (sIR-Fc; Bass et al., 1996, J. Biol. Chem. 271:19367-19375) was determined using fluorescence polarization assays (FP). For these experiments, each data point represents the average of two replicate wells. The lines represent the best fit to a four-parameter non-linear regression analysis of the data, which was used to determine IC₅₀ values.

[0443] The assays were performed in a 384-well black microplate (NUNC) with a final volume of 30 μl. Final incubation conditions were 1 nM FITC-RP9, 10 nM sIR, 0.05 M Tris-HCl (pH 8 at 25° C.), 0.138 M NaCl, 0.0027 M KCl, 0.05% BGG (bovine gamma globulin), 0.005% Tween-20. After 16-24 h of incubation at RT, the fluorescence signal at 520 nm was read on an Analyst™ AD plate reader (LJL BioSystems, Inc.). Primary data were background corrected using 10 nM sIR without FITC-RP9 addition, normalized to buffer controls and then expressed as % specific binding. The Z′-factor was greater than 0.5 (Z′=1−(3σ₊+3σ₋)/|μ₊−μ₋|; Zhang et al., 1999, J. Biomol. Screen. 4:67-73) and the assay dynamic range was ˜125 mP. In parallel with these experiments, TR-FRET assays were performed using rhIGF-1R and b-20E2, as described above. Results of the FP and TR-FRET experiments are shown in Table 22, below.

TABLE 22

| | | | | | | | |
|---|---|---|---|---|---|---|---|
| | FP | TR-FRET | Bndg Ratio | | Site | SEQ ID | |
| Peptide | sIR-Fc | rhIGF-1R | IGF-1R/1R | Form. | IGF-1R | NO: | Sequence |

| | | | | | | | |
|---|---|---|---|---|---|---|---|
| RP4 | 17 | 8100 | 476 | 2 | 1 | 1552 | PPWGARFYDAIEQLVFDNL |
| S175 | 10 | 1650 | 165 | 1 | 1 | 1560 | GRVDWLQRNANFYDWFVA |
| | | | | | | | ELG |
| RP15 | 28 | 706 | 25 | 1 | 1 | 2130 | SQAGSAFYAWFDQVLRTV |
| H2C(D117) | 66 | 600 | 9 | 1 | 1 | 2117 | FHENFYDWFVQRVSKK |
| 20E2(D118) | 51 | 100 | 1.9 | 2 | 1 | 2209 | DYKDFYDAIDQLVRGSARA |
| | | | | | | | GGTRD |
| RP9 | 24 | 33 | 1.4 | 1 | 1 | 1559 | GSLDESFYDWFERQLG |
| G33 | 139 | 178 | 1.3 | 1 | 1 | 1600 | GIISQSCPESFYDWFAGQV |
| | | | | | | | SDPWWCW |
| E8(D120) | 206 | 175 | 0.85 | 10 | 2 | 2118 | GGTVWPGYEWLRNA |
| C1(D112) | 52 | 10 | 0.19 | 1 | 1 | 1550 | CWARPCGDAANFYDWFV |
| | | | | | | | QQAS |
| RP16 | 6400 | 961 | 0.15 | | | 1553 | VMDARDDPFYHKLSELVT |

FP sIR-Fc column shows IC₅₀ (nM) values obtained (vs. FITC-RP9); TR-FRET rhIGF-1R column shows IC₅₀ (nM) values obtained (vs. b-20E2); for binding ratio: higher values indicated higher affinity for IR than IGF-1R. Form. = formula; Bndg. = binding.

[0444] These results demonstrated that S175, RP4, and RP15 showed high affinities for IR and showed high binding ratios for IGF-1R over IR. H2C, 20E2, RP9, and C1 were slightly less potent than S175, RP4, and RP15 at IR, and these peptides had lower binding ratios for IGF-1R over IR. G33 and E8 were less potent than S175, RP4, and RP15 at IR, and showed comparable binding to IGF-1R and IR. RP16 had poor potency at IR and IGF-1R, but had higher affinity for IGF-1R than IR.

### Example 13

### IGF-1R Binding Peptides—Additional Isolates

[0445] The isolation and characterization of peptides which bind to and subdivide the insulin receptor binding site into multiple, non-overlapping regions designated Site 1 and Site 2 has been previously described (Beasley et al., U.S. application Ser. No. 09/538,038, filed Mar. 29, 2000, published as WO 01/72771; Pillutla et al., U.S. patent application Ser. No. 09/962,756, filed Sep. 24, 2001; Pillutla et al., 2002, J. Biol. Chem. 277:22590-22594). To identify IGF-1R antagonists, a multi-tiered approach was used. First, Site 1 peptides with greater selectivity for IGF-1R as compared to IR were identified. Second, secondary libraries were generated using information from the primary library pannings. These secondary libraries were designed to define the amino acid requirements for binding, specificity, and affinity.

[0446] To determine optimal sequence requirements within the motif, a secondary library based on a clone identified from the random library was made where the flanking regions were held constant, while the core was allowed to change. The library was prepared from doped oligonucleotides so that half of the amino acid residues (on average) in the core sequence were altered per peptide. Panning of these libraries identified substitutions within the core that did or did not affect binding. In an alternative approach, amino acids in the flanking regions conferring binding affinity and/or specificity were defined by designing secondary libraries wherein the core was held constant and the flanking sequences were either doped or randomized. For both types of libraries, amino acids optimal for binding were selected by panning against IGF-1R. Once secondary peptides with the appropriate binding characteristics were identified, a preferred peptide was defined. To do this, the amino acids at each position were optimized based on a comparison of the expected results from the doping strategy and the actual results observed in the binding population.

[0447] A. Primary Peptide Libraries

[0448] The E. coli, strain TG1 (genotype=K12Δ(lac-pro), supE, thi, hsdΔ5/F′[traD36, proAB, lacI^{q}, lacZΔM15]) was obtained from Pharmacia (Piscataway N.J.). DNA fragments coding for peptides containing 40 random amino acids were generated by a PCR-technique using synthetic oligonucleotides. A 145-base oligonucleotide was synthesized to include the sequence (NNK)₄₀ where N=A, C, T, or G and K=G or T. This oligonucleotide was used as the template in PCR reactions along with two shorter oligonucleotide primers, both of which were biotinylated at their 5′ ends. The resulting product was purified, concentrated, and ligated to the phagemid pCANTAB5E (Pharmacia). The ligation product was purified and electroporated into competent bacterial cells. The transformants were grown at 37° C. for 1 h, pooled and plated onto selection medium. Depending upon the amount of DNA electroporated, the diversity of the random 40mer peptide cell library was found to be between 1.6×10¹⁰ and 1×10¹¹ independent clones. The phage library was produced by rescue of the cell library according to standard phage preparation protocols (G. P. Smith and J. K. Scott, 1993, Methods Enzymol. 217:228-257). Phage titers were usually at 4×10¹³ cfu/ml. In previous experiments, sequencing of randomly selected clones from the cell library indicated that about 54% of all clones were in-frame. The short FLAG sequence (DYKD; SEQ ID NO:1545), was included at the N-terminus as an immunoaffinity tag. In addition, the E-tag epitope (GAPVPYPDPLEPR; SEQ ID NO:XX) was engineered into the carboxy terminus of the peptide. Additional random phage libraries of 20mer peptides were constructed using a similar approach. The diversity of these cell libraries was estimated to be >1.1×10¹¹ clones.

[0449] B. Secondary and Tertiary Libraries

[0450] The desired number of amino acid mutations were introduced in the parental peptide at the codon level when the synthetic DNA template was produced. For example, where a change in 45% of the amino acids was desired (i.e., 9 changes/20 amino acids), then a 60% change at the codon level was needed due to the redundancy of the genetic code (efficiency factor of 0.75). Per position, this translated to 20% doping at the level of DNA synthesis. At the DNA synthesis level, a 20% doping included the following ratio of nucleotides in the synthetic template:

| | | | | |
|---|---|---|---|---|
| A | 80% A, | 6.6% C, | 6.6% G, | 6.6% T |
| C | 6.6% A | 80% C, | 6.6% G, | 6.6% T |
| G | 6.6% A | 6.6% C, | 80% G, | 6.6% T |
| T | 6.6% A | 6.6% C, | 6.6% G, | 80% T |

[0451] In this chart, the A, C, T, G (underlined and in bold) bases represent the original bases in the parental sequence. When the clones from cell libraries were sequenced and the number of amino acid mutations was examined per peptide, the average number of changes was found to correlate to the desired value. After the synthetic template was obtained, the DNA was ligated to the pCANTBA5E phagemid vector to produce the cell library in the TGI strain as previously described. Phage rescue was carried out to produce the phage library used in the panning experiments.

[0452] C. Panning of peptide libraries

[0453] A standard method was used to coat and block all microtiter plates. Plates were coated with IGF-1R in 0.2 M NaHCO₃, pH 9.4. One hundred microliters of solution containing 100 ng of IGF-1R was added to an appropriate number of wells in a 96-well microtiter plate (MaxiSorp plates, Nunc) and incubated overnight at 4° C. Wells were then blocked with a solution of 2% non-fat milk in PBS (MPBS) at room temperature (RT) for at least 1 h.

[0454] Four to eight wells coated with IGF-1R were used for each round of panning. One hundred microliters of phage were added to each well. For the first round, the input phage titer was ˜10¹³ cfu/ml. For subsequent rounds, the input phage titer was approximately 10¹² cfu/ml. Phage were allowed to bind for 2-3 h at RT. The wells were then quickly washed 13 times with 300 μl/well of PBS. Bound phage were eluted by incubation with 150 μl/well of 50 mM glycine-HCl, pH 2.0 for 5 min. The resulting solution was pooled and then neutralized with Tris-HCl, pH 8.0.

[0455] Log phase TG1 cells were infected with the eluted phage, in 2xYT medium for 1 h at 37° C. prior to the addition of helper phage, ampicillin and glucose (2% final concentration). After incubation for another hour at 37° C., the cells were spun down and resuspended in 2xYT-AK medium. The cells were then returned to the shaker and incubated overnight at 37° C. Phage amplified overnight was then precipitated and subjected to the next round of panning. A total of 96 clones were picked at random from rounds 3 and 4 and screened for binding activity.

[0456] D. ELISA Analyses of Phage

[0457] For phage pools, cells from frozen stocks were grown and phage were prepared as described above. For analysis of individual clones, colonies were picked and phage prepared as described above. Subsequent steps were the same for pooled and clonal phage. Microtiter wells were coated and blocked as described above. Wells were coated with either IGF-1R or IR. Phage resuspended in MPBS (PBS containing 2% non-fat milk) were added to wells (100 μl/well) and incubated at room temperature for 1 h. The phage solution was then removed, and the wells were washed three times with PBS at room temperature.

[0458] Anti-M13 antibody conjugated to horseradish peroxidase (Pharmacia Biotech) was diluted 1:3000 in MPBS and added to each well (100 μl/well). Incubation was for another hour at room temperature, followed by PBS washes as described. Color was developed by addition of ABTS solution (100 μl/well; Boehringer). Color development was stopped by adjusting each well to 0.5% SDS. Plates were analyzed at 405 nm using a SpectraMax 340 plate reader (Molecular Devices) and SoftMax Pro software. Data points were averaged after subtraction of appropriate blanks. A clone was considered “positive” if the A₄₀₅ of the well was ≧2-fold over background.

[0459] E. Determination of Amino Acid Preferences

[0460] Amino acid preferences for each peptide were determined as follows. The expected frequency of each of the 20 amino acids at that position was calculated based on codon usage and % doping for that library. This was then compared to the actual frequency of occurrence of each amino acid at every position after four rounds of biopanning. Any amino acid that occurred at a frequency ≧2-fold was considered preferred. The most preferred amino acid(s) were defined as those with the greatest enrichment after panning. Using the amino acid preferences determined for each position, peptides with the most preferred sequences were designed.

[0461] Representative monomer and dimer peptides identified by panning secondary libraries for binding to IGF-1R are shown in FIGS. 54A-54B, 55A-55B, 56A-56B, 57A-57B, 58A-58B, 59A-59B, 60A-60C, 61A-61B, 62A-62B, 63A-63B, and 64A-64B. Primary library pannings produced several peptides, including RP6, RP48, RP52, RP54, RP56, and RP60, described above. Peptides designed according to amino acid preferences (i.e., peptides by design) included RP30-IGF, RP31-IGF, and RP33-IGF.

### Example 14

### IGF-1 Antagonist Peptides

[0462] A. Cells and Reagents

[0463] MCF-7 and MiaPaCa cell lines were obtained from the American Type Culture Collection (Manassas, Va.). Cells were routinely grown in RPMI1640 medium supplemented with 10% fetal bovine serum and 1% glutamax. The extra-cellular domain of IGF-1R was obtained as a recombinant protein from R&D Systems (Minneapolis, Minn.).

[0464] B. Whole-Cell Lysates

[0465] For qualitative IRS-1 phosphorylation analysis, MCF-7 cells in monolayer cultures (about 80% of confluency) were used. After about 20 h of starvation in serum-free RPMI medium (GibcoBRL), cells were stimulated for 10 min in the same medium containing IGF-1 (Peprotech), or IGF-1 plus peptides (synthetic peptides produced by Research Genetics), or no addition as a negative control. After treatment, cells were rinsed twice with ice-cold PBS containing 0.2 mM PMSF and 1 mM Na₃VO₄ (all from SIGMA). Cells were scraped into the same buffer and pelleted by centrifugation at 200×g for 3 min. Lysis was done in RIPA buffer (0.8766% NaCl, 0.11% SDS, 0.5% deoxycholic acid (all from SIGMA), 1% Triton X-100, (Boehringer Mannheim)) containing phosphatase inhibitor cocktails 1 and 2 (SIGMA) and protease cocktail inhibitor tablet (Boehringer Mannheim) for 5 min on ice. Cell lysates were cleared by centrifugation for 5 min at 14 000×g and the resulting supernatant was snap-frozen in ethanol-dry ice and stored at −80° C. The protein concentration was determined using the D_{C} Protein Assay Kit (Bio-Rad Laboratories).

[0466] C. Immunoprecipitation and Western Blot Analysis

[0467] Immunoprecipitations were performed with pre-cleared lysates for 4 h at 40° C. using 0.3-0.5 mg total protein with 1 μg polyclonal anti-IRS-1 antibody (Upstate Biotechnology), and 25 μl protein A/agarose slurry (SIGMA). Agarose beads with immobilized proteins were washed 3 times with IP wash buffer (50 mM Tris pH 7.5 (GibcoBRL), 150 mM NaCl, 1 mM Na₃VO₄, 0.2 mM PMSF). Protein elutions and denaturation were done for 3 min at 95° C. in 30 μl of Laemmle sample buffer (Bio-Rad Laboratories) with 0.5 M β-mercaptoethanol (SIGMA).

[0468] Immunoprecipitates were subjected to SDS-PAGE on 4-15% Tris-HCl Ready Gels and transferred to Trans-Blot Transfer Medium nitrocellulose membranes (both from Bio-Rad Laboratories). Membranes were blocked with PBS-Tween 20 (SIGMA) containing 2% non-fat milk. For detection of IRS-1 protein, blots were incubated with anti-IRS-1 antibody, followed by secondary antibody goat anti-rabbit IgG, HRP-conjugate. For detection of phosphorylated IRS-1, blots were incubated with monoclonal anti-phosphotyrosine (4G10) HRP-conjugated antibody. All antibodies were obtained from Upstate Biotechnology. Blots were exposed to an enhanced chemifluorescence substrate (ECL Western Blotting Analysis System, Amersham Pharmacia Biotech). Films were developed and fluorescent signal was visualized for qualitative analysis.

[0469] D. MCF-7 and MiaPaCa Cell Assays

[0470] Peptides produced synthetically were maintained as 30 mM stock in 100% DMSO, while recombinant dimers were diluted in water. All synthetic and recombinant peptides were stored at −80° C. The final concentration of DMSO was <0.1%. MCF-7 and MiaPaCa (ATCC, Rockville, Md.) cells were maintained in RPMI containing 10% FBS. All cells were starved overnight by growing them in RPMI media, which was serum free. Cells were trypsinized, washed twice with PBS before being seeded at 1-3×10³ cells per well in a 96-well plate with a volume of 150 μl/well. All points were done in duplicate in 96-well plates. For antagonist activity assays, immediately before the addition of peptides, all media was gently removed from the wells. Peptides were serially diluted 1:2 in a final volume of 150 μl in a separate plate using RPMI containing 0.1% FBS plus 50 nM IGF-1. This mixture was transferred onto the cells, and the plates were incubated for 72 h at 37° C. in a CO₂ incubator. To quantitate cell number, 10 μl of WST-1 reagent (Roche Molecular Biochemicals, Indianapolis, Ind.) was added to each well and the plates were returned to the 37° C./CO₂ incubator for approximately 2 h. Measurements were then read at 440 nm, with 700 nm used as a reference.

[0471] E. Binding (ALPHAScreen) Assays

[0472] To assay binding, the relative potencies of peptides as compared to IGF-1 were analyzed in a competition system utilizing biotinylated-human IGF-1 (b-hIGF-1) and His-tagged soluble recombinant human IGF-1R (srhIGF-1R-his; R&D systems, Inc., Minneapolis, Minn.). Detection of the receptor ligand interaction was measured in an amplified luminescent proximity homogeneous assay (ALPHAScreen; BioSignal-Packard, Montreal). The assay was performed in 384-well Nunc™white polystyrene microplates (Nalge Nunc International, Naperville, Ill.) with a final volume of 40 μl. Final incubation conditions were 1 nM b-hIGF-1, 10 nM srhIGF-1R-his, 0.025 M HEPES (pH 7.4 at 25° C.), 0.100 M NaCl, 0.1% BSA (Cohn Fraction V; Sigma Chemical Co., St. Louis, Mo.), 10 μg/ml nickel conjugated acceptor beads, and 10 μg/ml streptavidin conjugated donor beads.

[0473] For the first step of the assay, hIGF-1 (PeproTech, Inc., Rocky Hill, N.J.), b-hIGF-1 (see below), and peptides were incubated for 2 h at room temperature. Each concentration of competitor was assayed in duplicate. Non-specific binding was determined in the presence of 3×10⁻⁵ M hIGF-1. In the second step of the assay, acceptor beads were added and the incubation was continued for 0.5 h. In the final step, donor beads were added and the incubation was continued for an additional 1 h. At the end of the incubation period, the fluorescence signal at 520 nm was read on a Fusion-α HT plate reader (Packard BioScience Company, Meriden, Conn.). Primary data were background corrected, normalized to buffer controls, and then expressed as % specific binding. The data were fit to a four-parameter non-linear regression analysis (y=min+(max−min)/(1+10̂((log IC50−x)*Hillslope))), which was used to determine IC₅₀ values. The Z′-factor for this assay was greater than 0.7 (Z′=1-(3σ++3σ−)/|μ+−μ−|) and the signal-to-background (S/B) ratio was between 40 and 70.

[0474] Human IGF-1 was biotinylated on free amino groups using Pierce EZ-Link™ Sulfo-NHS-LC-Biotinylation Kit (PN #21430, Pierce, Rockford, Ill.). Human IGF-1, at 2 mg/ml in PBS, pH 7.2, was incubated at room temperature for 30 min with a 20-fold excess of sulfo-NHS-LC-biotin over theoretical total free amino groups. Unreacted biotins were removed by extensive dialysis (Pierce Slide-A-Lyzer® Dialysis Cassettes) against PBS, and degree of conjugation was determined by HABA (2-(4′-hydroxyazobenzene)benzoic acid) assay (Pierce product literature #21430). Number of biotins per hIGF-1 varied between 3 and 5.

[0475] F. FDC-P2 Cell Assays

[0476] Peptides produced synthetically were maintained as 30 mM stock in 100% DMSO, while recombinant dimers were diluted in water. All synthetic and recombinant peptides were stored at −80° C. The final concentration of DMSO was <0.1%. FDC-P2 (obtained from Dr. J. Pierce, National Institutes of Heath, Bethesda, Md.) cells were maintained in RPMI containing 15% FBS and 5% WEHI (Genoquest, Germantown, Md.) at 37° C. in a CO₂ incubator. To initiate experiments, all cells were starved for 5 h in RPMI containing 1% FBS. Cells were seeded at 1×10⁴ cells per well into 96-well plates at a volume of 75 μl/well. Peptides were added at 2× final concentrations and all points were done in duplicate. For antagonist assays, peptides at 2× concentration were serially diluted 1:2 in a final volume of 75 μl in a separate plate using RPMI containing 0.1% FBS and 1 nM IGF-1. This mixture was transferred onto the cells to yield a final volume of 150 μl. The plates were incubated for 48 h at 37° C. in a CO₂ incubator. To quantitate cell number, 10 μl of WST-1 reagent (Roche Molecular Biochemicals, Indianapolis, Ind.) was added to each well and the plates were returned to the 37° C./CO₂ incubator for approximately 2 h. Measurements were then taken at 440 nm, with 700 nm used as a reference.

[0477] G. Results

[0478] Peptide RP33-IGF exhibited an affinity for IGF-1R close to that of IGF-1 (9 nM; Table 23). Other peptides, such as RP54 showed affinity in the micromolar range (Table 23). In contrast to the observations made for IR, competition experiments indicated that IGF-1R Site 1 and 2 peptides were able to compete with each other. This suggested that the functional interactions between Site 1 and Site 2 in IGF-1R differed from those found in IR (unpublished data).

[0479] To determine if any Site 1 peptides could act as antagonists, proliferation assays were established utilizing IGF-1 and IGF-2 responsive human tumor cell lines. Sixteen human tumor cell lines were screened for their ability to proliferate in the presence IGF-1 and IGF-2 under serum-free conditions. Two cell lines, MCF-7 (breast carcinoma) and MiaPaCa (pancreatic carcinoma), showed the best dose response curves for IGF-1 (ED₅₀=5 nM; FIGS. 65A-65F), and were used for subsequent experiments.

[0480] Peptides were synthesized and screened in the proliferation assay at an IGF-1 dose ten times the ED₅₀ (50 nM). Several antagonist peptides were identified, including RP33-IGF, which consistently blocked IGF-1 and IGF-2 proliferation of both MCF-7 and MiaPaCa (FIGS. 66B-66C). In addition, peptides RP52 and RP54 were found to act as antagonists in at least one cell line (Table 26; FIGS. 70A-70B). Peptides RP52 and RP54 are classified as miscellaneous peptides, which were not categorized into any of the formulae (e.g., Formula 1, Formula 2, etc.) disclosed herein.

[0481] Experiments were then performed to determine whether antagonist peptides could block receptor activation at the level of key signaling intermediate, IRS-1. First, the optimal time and concentration of IGF-1 needed for maximal activation of IRS-1 was established (FIGS. 67A-67B and FIGS. 68A-68B). Maximum phosphorylation of IRS-1 was observed after 10 min of treatment and was followed by a drop-off of the signal (FIGS. 67A-67B). This pattern was presumably due to degradation of the IRS-1 protein by a mechanism involving proteasomes (Lee et al., 2000, Mol. Cell. Biol., 2000, 20:1489-1496). Second, RP33-IGF was compared to two unrelated peptides. The RP33-IGF peptide inhibited IRS-1 phosphorylation, whereas the unrelated peptides had no effect in the proliferation assay (FIGS. 69A-69B).

[0482] The RP6KK peptide was also tested for activity, since the RP33-IGF peptide was originally derived from the RP6KK sequence. Both RP6KK and RP33-IGF were found to effectively block activation of IRS-1 by IGF-1 (FIGS. 69A-69B). At the concentration used, greater than 90% of the protein was unphosphorylated, indicating that both peptides efficiently blocked IGF-1R activation. However, RP33-IGF differed from RP6KK by 11 amino acids, and RP33-IGF was a superior IGF-1R antagonist in the cell proliferation assays (Tables 24-25). The difference in biological activity did not appear to be related to stability of the peptides since both were found to remain intact during the course of the assays (unpublished data).

TABLE 23

| Pep. (Clone) | Sequence | Site* | Formula | Affin. (μM) | Activ.^{&} | IC₅₀ (μM) |
|---|---|---|---|---|---|---|
| RP33-IGF | [chemical structure] | 1 | 2 | 0.009 | Antag. | 0.1 - MCF-70.7 - MiaPaCa |
| RP6KK | [chemical structure] | 1 | 2 | 0.19 | Antag. | |
| RP52(20C-3-A3-IGFR) | [chemical structure] | | Misc. | ND | Antag. | 0.5 - MCF-7 |
| RP54(20C-4-A7-IGFR) | [chemical structure] | | Misc. | 1.6 | Antag. | 2.5 - MCF-74.3 - MiaPaCa |

Peptide antagonists of IGF-1R identified from primary and secondary library pannings.
*site to which a peptide binds was assigned based on competition assays using both IR and IGF-1R as target;
⁺affinity was determined using the AlphaScreen assay versus IGF-1 as described herein;
^{$}antagonism was determined from the proliferation assays in the presence of IGF-1 using MCF-7 and MiaPaCa cells as described herein;
ND = not done;
Pep. = peptide;
Affin. = affinity;
Antag. = antagonist;
Misc. = miscellaneous peptide;
Cysteine residues are boxed.

TABLE 24
IGF-1R Antagonists in MCF-7 Cells

| | | Site | Cellular | Binding | |
|---|---|---|---|---|---|
| Peptide | Form. | IGF-1R | IC₅₀ (M) | IC₅₀ (M) | Sequence |
| H2C-A-H6 | 1 | 1 | 4.0E−07 | 3.2E−05 | [chemical structure] |
| C1KK | 1 | 1 | 2.8E−06 | 4.2E−08 | [chemical structure] |
| RP33K-IGF | 2 | 1 | 2.1E−08 | 1.8E−09 | [chemical structure] |
| RP6KK | 2 | 1 | 9.0E−06 | 1.8E−07 | [chemical structure] |
| RP54 | Misc. | | 4.3E−06 | 4.9E−07 | [chemical structure] |
| RP52 | Misc. | | 4.5E−07 | 3.0E−05 | [chemical structure] |
| RP30-IGF-12-RP30-IGF | 2-2 | 1-1 | 3.4E−06 | 2.4E−07 | [chemical structure] |
| D8B12-12-RP9 | 6-1 | 2-1 | 6.9E−06 | N/A | [chemical structure] |

Monomer and dimer peptides which block IGF-1 activity in cell proliferation assays in MCF-7 cells.
Form. = formula;
Misc. = miscellaneous sequence;
Cysteine pairs are shaded and underlined;
FY, WF, and L residues from Formula 1 and Formula 2 motifs are shaded and shown in bold.

TABLE 25
IGF-1R Antagonists in MiaPaCa Cells

| | | Site | Cellular | Binding | |
|---|---|---|---|---|---|
| Peptide | Form. | IGF-1R | IC₅₀ (M) | IC₅₀ (M) | Sequence |
| RP30-IGF | 2 | 1 | 2.0E−06 | 1.6E−07 | [chemical structure] |
| RP43 | 2 | 1 | 1.0E−07 | 1.9E−07 | [chemical structure] |
| RP33K-IGF | 2 | 1 | 2.0E−07 | 1.8E−09 | [chemical structure] |
| L-RP9ex | 1 | 1 | 1.3E−05 | 2.2E−06 | [chemical structure] |
| RP54 | Misc. | | 5.9E−06 | 4.9E−07 | [chemical structure] |
| RP56 | Misc. | | 9.4E−06 | 6.0E−05 | [chemical structure] |
| RP30-IGF-12-RP30-IGF | 2-2 | 1-1 | 4.6E−06 | 2.4E−07 | [chemical structure] |
| D8B12-12-RP9 | 6-1 | 2-1 | 4.7E−05 | N/A | [chemical structure] |

Monomer and dimer peptides which block IGF-1 activity in cell proliferation assays in MiaPaCa cells.
Form. = formula;
Misc. = miscellaneous sequence;
Cysteine pairs are shaded and underlined;
FY, WF, and L residues from Formula 1 and Formula 2 motifs are shaded and shown in bold.

TABLE 26
IGF-1R Antagonists in FDC-P2 cells

| | | Site | Cellular | Binding | |
|---|---|---|---|---|---|
| Peptide | Form. | IGF-1R | IC₅₀ (M) | IC₅₀ (M) | Sequence |
| RP30-IGF | 2 | 1 | 4.0E−06 | 1.6E−07 | [chemical structure] |
| RP9-lig | 1 | 1 | 3.2E−04 | 2.2E−07 | [chemical structure] |
| lig-RP9 | 1 | 1 | 8.8E−08 | 1.5E−06 | [chemical structure] |
| RP43 | 2 | 1 | 7.0E−06 | 1.9E−07 | [chemical structure] |
| H2C-A-H6 | 1 | 1 | 3.0E−07 | 3.2E−05 | [chemical structure] |
| RP6KK | 2 | 1 | 1.0E−06 | N/A | [chemical structure] |
| C1 | 1 | 1 | 4.0E−06 | 4.2E−08 | [chemical structure] |
| RP33-IGF | 2 | 1 | 7.0E−06 | 1.9E−06 | [chemical structure] |
| RP6 | 2 | 1 | 5.0E−06 | 3.5E−07 | [chemical structure] |
| RP9 | 1 | 1 | 2.0E−06 | 9.7E−07 | [chemical structure] |
| RP9-RP9 (C-C) | 1-1 | 1-1 | 3.0E−05 | 1.2E−07 | [chemical structure] |
| RP9-RP9 (C-N) | 1-1 | 1-1 | 3.0E−05 | 1.7E−07 | [chemical structure] |
| G33-RP9 | 1-1 | 1-1 | 1.0E−06 | N/A | [chemical structure] |
| RP9-L-RP9 | 1-1 | 1-1 | 9.0E−07 | 3.4E−06 | [chemical structure] |
| RP9-L-RP6 | 1-2 | 1-1 | 3.0E−06 | N/A | [chemical structure] |
| G33-D8B12 | 1-6 | 1-2 | 3.0E−06 | N/A | [chemical structure] |
| D8B12-RP9 | 6-1 | 2-1 | 1.0E−05 | N/A | [chemical structure] |

Monomer and dimer peptides which block IGF-1 Activity in cell proliferation assays in FDC-P2 cells.
Form. = formula;
Lig = Diaminopropionic acid with a 2-aminohydroxyacetyl group (CO—CH2—O—NH2) on the side chain amino group;
Numbers such as 17, 19, 12, represent specific chemical linkers (see Table 3);
C-C = C-terminal to C-terminal linkage;
N-N = N-terminal to N-terminal linkage;
Cysteine pairs are shaded and underlined;
FY, WF, and L residues from Formula 1 and Formula 2 motifs are shaded and shown in bold.

### Example 15

### IGF-1 Agonist Peptides

[0483] A. MCF-7 and MiaPaCa Cell Assays

[0484] Peptides produced synthetically were maintained as 30 mM stock in 100% DMSO, while recombinant dimers were diluted in water. All synthetic and recombinant peptides were stored at −80° C. The final concentration of DMSO was <0.1%. MCF-7 and MiaPaCa (ATCC, Rockville, Md.) cells were maintained in RPMI containing 10% FBS. All cells were starved overnight by growing them in serum-free RPMI media. Cells were trypsinized, washed twice with PBS before being seeded at 1-3×10³ cells per well in a 96-well plate in a volume of 150 μl/well. All points were done in duplicate in 96-well plates. For agonist activity assays, immediately before the addition of peptides, all media was gently removed from the wells. Peptides were serially diluted 1:2 in a final volume of 150 μl in a separate plate using RPMI containing 0.1% FBS. The diluted peptide solutions were transferred onto the cells, and the plates were incubated for 72 h at 37° C. in a CO₂ incubator. To quantitate cell number, 10 μl of WST-1 reagent (Roche Molecular Biochemicals, Indianapolis, Ind.) was added to each well and the plates were returned to the 37° C./CO₂ incubator for approximately 2 h. Measurements were then taken at 440 nm, with 700 nm used as a reference.

[0485] B. FDC-P2 Cell Assays

[0486] Peptides were maintained and stored as indicated above. FDC-P2 cells (obtained from Dr. J. Pierce, NIH) were maintained in RPMI containing 15% FBS and 5% WEHI (Genoquest, Germantown, Md.) at 37° C. in a CO₂ incubator. To initiate experiments, all cells were starved for 5 h in RPMI containing 1% FBS. Cells were seeded at 1×10⁴ cells per well into 96-well plates at a volume of 75 μL/well. Peptides were added at 2× final concentration and all points were done in duplicate. For agonist assays, peptides at 2× concentration were serially diluted 1:2 in a final volume of 75 μl in a separate plate using RPMI containing 0.1% FBS. The diluted peptide solutions were transferred onto the cells to yield a final volume of 150 μl. The plates were incubated for 48 h at 37° C. in a CO₂ incubator. To quantitate cell number, 10 μl of WST-1 reagent (Roche Molecular Biochemicals, Indianapolis, Ind.) was added to each well and the plates were returned to the 37° C. incubator for approximately 2 h. Measurements were taken at 440 nm, with 700 nm used as a reference.

[0487] For these experiments, potencies of peptide competition were determined using the AlphaScreen assay format. Primary data were background corrected, normalized to buffer controls and then expressed as % specific binding. The data were fit to a four-parameter non-linear regression analysis (y=min+(max−min)/(1+10̂((log IC₅₀−x)*Hillslope))), which was used to determine IC₅₀ values. The Z′-factor for this assay is greater than 0.7 (Z′=1−(3σ₊+3σ₋)/|μ₊−μ₋|) and the signal-to-background (S/B) ratio was between 40 and 70.

[0488] C. Results

[0489] Several IGF-1R agonist peptides were identified which consistently stimulated proliferation of both MCF-7 and MiaPaCa cells (Tables 27-28; FIGS. 73A-73D and FIGS. 74A-741). Monomer peptides with IGF-1R agonist activity included RP60, RP48, G33, C1, and L-RP9ex (Tables 27-28). Dimer peptides with IGF-1R agonist activity included RP30-IGF-12-D112, RP30-IGF-12-RP31-IGF, RP31-IGF-12-RP30-IGF, D112-12-RP30-IGF, RP6-L-D8B12, D8B12-12-RP9, D112-12-D112, RP9-12-RP9, and RP9-L-RP6 (Tables 27-28). Agonist peptides were also identified using FDC-P2 cell proliferation assays (Table 29). Monomer peptides with IGF-1R agonist activity included G33-lig, G33, S175, D815, lig-D815, RP31-IGF, and D815 (Table 29). Dimer peptides with IGF-1R agonist activity included RP6-RP9, G33-6-G33, and D815-RP9 (Table 29).

[0490] In addition, peptides with agonist or antagonist activity in MCF-7 or MiaPaCa cell proliferation assays were shown to compete against IGF-1 for binding to IGF-1R (FIGS. 71A-71F and FIGS. 72A-72E). Potencies of peptide competition were determined using the AlphaScreen assay format for peptide monomers RP60, RP48, sG33, L-RP9ex, and 12-RP9ex (FIGS. 71A-71F). Potencies were also determined for dimer peptides rRP30-IGF-12-D112, rRP30-IGF-12-RP31-IGF, rRP31-IGF-12-RP30-IGF, rD112-12-RP30-IGF, and rD112-12-D112 (FIGS. 72A-72E).

[0491] The biological response of the monomers and dimers in the FDC-P2 (myeloid cells; IGF-1R/IGF-1R receptor), MCF-7 (breast cancer cells; hybrid IGF-1R/IR receptor) and MiaPaCa (pancreatic cancer cells; hybrid IGF-1R/IR receptor) assays were compared (Table 30). In some instances, a modulatory effect (agonism or antagonism) was seen in certain cell lines but not in others. For example, the RP30-IGF peptide exhibited antagonist activity in FDC-P2 and MiaPaCa cells, but not in MCF-7 cells (Table 30). The C1 peptide exhibited antagonist activity in FDC-P2 and MCF-7 cells, but not in MiaPaCa cells. The RP9-RP6, L-RP9ex, and D8B12-12-RP9 peptides exhibited either antagonist or agonist activity depending on the cell line used (Table 30). Therefore, it is possible to use the peptides of the invention to target specific cell types with specific modulatory effects.

TABLE 27
IGF-1R Agonists in MCF-7 Cells

| | | Site | Cellular | Binding | |
|---|---|---|---|---|---|
| Peptide | Form. | IGF-1R | EC₅₀ (M) | IC₅₀ (M) | Sequence |
| G33 | 1 | 1 | 3.0E−07 | 6.0E−07 | [chemical structure] |
| 12-RP9ex | 1 | 1 | 1.0E−05 | 4.5E−07 | [chemical structure] |
| L-RP9ex | 1 | 1 | 4.2E−06 | 2.2E−06 | [chemical structure] |
| RP48 | Misc. | | 3.2E−06 | 6.6E−07 | [chemical structure] |
| RP60 | Misc. | | 2.1E−06 | 1.6E−05 | [chemical structure] |
| RP9-12-RP9 | 1-1 | 1-1 | 2.4E−06 | N/A | [chemical structure] |
| RP9-L-RP6 | 1-2 | 1-1 | 1.3E−06 | N/A | [chemical structure] |
| D112-12-RP30-IGF | 1-2 | 1-1 | 2.5E−07 | 1.7E−07 | [chemical structure] |
| D112-12-D112 | 1-1 | 1-1 | 3.5E−07 | 6.2E−07 | [chemical structure] |
| RP30-IGF-12-D112 | 2-1 | 1-1 | 4.1E−07 | 1.1E−06 | [chemical structure] |
| RP6-L-D8B12 | 2-6 | 1-2 | 7.1E−07 | N/A | [chemical structure] |
| RP30-IGF-12-RP31-IGF | 2-6 | 1-2 | 1.1E−07 | 1.1E−06 | [chemical structure] |
| RP31-IGF-12-RP30-IGF | 6-2 | 2-1 | 3.0E−06 | 7.2E−08 | [chemical structure] |
| D8B12-12-RP9 | 6-1 | 2-1 | 3.5E−07 | N/A | [chemical structure] |

Monomer and dimer peptides which stimulate cell proliferation using the MCF-7 cells.
Form. = formula;
N/A = not available;
Misc. = miscellaneous sequence;
Cysteine pairs are shaded and underlined;
FY, WF, and L residues from Formula 1 and Formula 2 motifs are shaded and shown in bold.

TABLE 28
IGF-1R Agonists in MiaPaCa Cells

| | | Site | Cellular | Binding | |
|---|---|---|---|---|---|
| Peptide | Form. | IGF-1R | EC₅₀ (M) | IC₅₀ (M) | Sequence |
| RP48 | Misc. | | 7.0E−06 | 6.6E−07 | [chemical structure] |
| RP60 | Misc. | | 3.1E−06 | 1.6E−05 | [chemical structure] |
| RP9-L-RP6 | 1-2 | 1-1 | 1.0E−06 | N/A | [chemical structure] |
| D112-12-RP30-IGF | 1-2 | 1-1 | 2.2E−06 | 1.7E−07 | [chemical structure] |
| D112-12-D112 | 1-1 | 1-1 | 2.5E−06 | 6.2E−07 | [chemical structure] |
| RP9-12-RP9 | 1-1 | 1-1 | 2.7E−06 | N/A | [chemical structure] |
| RP6-L-D8B12 | 2-6 | 1-2 | 5.0E−06 | N/A | [chemical structure] |
| RP31-IGF-12-RP30-IGF | 6-2 | 2-1 | 4.4E−06 | 7.2E−08 | [chemical structure] |
| RP30-IGF-12-RP31-IGF | 2-6 | 1-2 | 6.8E−05 | 1.1E−06 | [chemical structure] |
| D8B12-12-RP9 | 6-1 | 2-1 | 1.0E−06 | N/A | [chemical structure] |

Monomer and dimer peptides which stimulate cell proliferation using the MiaPaCa cells.
Form. = formula;
N/A = not available;
Misc. = miscellaneous sequence;
Cysteine pairs are shaded and underlined;
FY, WF, and L residues from Formula 1 and Formula 2 motifs are shaded and shown in bold.

TABLE 29
IGF-1R Agonists in FDC-P2 Cells

| | | Site | Cellular | Binding | |
|---|---|---|---|---|---|
| Peptide | Form. | IGF-1R | EC₅₀ (M) | IC₅₀ (M) | Sequence |
| G33-lig | 1 | 1 | 3.0E−06 | 7.1E−07 | [chemical structure] |
| G33 | 1 | 1 | 2.0E−06 | 6.0E−07 | [chemical structure] |
| S175 | 1 | 1 | 1.0E−05 | 7.1E−06 | [chemical structure] |
| D815 | 6 | 2 | 3.0E−06 | 1.1E−05 | [chemical structure] |
| lig-D815 | 6 | 2 | 1.0E−05 | 2.2E−06 | [chemical structure] |
| RP31-IGF | 6 | 2 | 2.0E−05 | 8.4E−07 | [chemical structure] |
| D815 | 6 | 2 | 1.0E−06 | 1.5E−06 | [chemical structure] |
| RP6-RP9 | 2-1 | 1-1 | 6.0E−06 | N/A | [chemical structure] |
| G33-6-G33 | 1-1 | 1-1 | 3.0E−06 | 1.4E−07 | [chemical structure] |
| D815-RP9 | 6-1 | 2-1 | 3.0E−06 | 1.1E−06 | [chemical structure] |

Monomer and dimer peptides which stimulate cell proliferation using the FDC-P2 cells.
Form. = formula;
N/A = not available;
Lig = Diaminopropionic acid with a 2-aminohydroxyacetyl group (CO—CH2—O—NH2) on the side chain amino group;
Cysteine pairs are shaded and underlined;
FY, WF, and L residues from Formula 1 and Formula 2 motifs are shaded and shown in bold.

TABLE 30

| | | | FDC-P2 | FDC-P2 | MCF-7 | MCF-7 | MiaPaCa | MiaPaCa |
|---|---|---|---|---|---|---|---|---|
| Peptide | Site IGFR/Formula | | Agonist | Antagonist | Agonist | Antagonist | Agonist | Antagonist |
| Monomers: | | | | | | | | |
| D815 | 2 (cys.) | 6 | + | | | | | |
| RP30-IGF | 1 (cys.) | 2 | | + | No | No | | + |
| RP31-IGF | 2 (cys.) | 6 | + | | + | | No | No |
| G33 | 1 (cys.) | 1 | + | | + | | + | |
| RP9 | 1 | 1 | | + | No | No | No | No |
| RP6 | 1 (cys.) | 2 | | + | | + | No | No |
| C1 | 1 (cys.) | 1 | | + | | + | No | No |
| RP33-IGF | 1 (cys.) | 2 | | + | | + | | + |
| H2C-A-H6 | 1 | 1 | ND | ND | | + | | + |
| RP43 | 1 (cys.) | 2 | | + | No | No | | + |
| RP48 | Misc. (cys.) | | ND | ND | + | | + | |
| RP52 | Misc. (cys.) | | ND | ND | No | No | | + |
| RP54 | Misc. (cys.) | | ND | ND | | + | | + |
| RP56 | Misc. | | ND | ND | No | No | | + |
| RP60 | Misc. (cys.) | | ND | ND | + | | + | |
| Dimers: | | | | | | | | |
| RP9-12-RP9 | 1-1 | 1-1 | ND | ND | + | | + | |
| D8B12-12-RP9 | 2-1 (cys.) | 2-1 | ND | ND | + | | + | |
| RP9-L-RP6 | 1-1 (cys.) | 1-2 | | + | + | | + | |
| RP6-D8B12 | 1-2 (cys.) | 2-2 | ND | ND | + | | + | |
| RP30-IGF-C1 | 1-1 (cys.) | 2-1 | ND | ND | + | | + | |
| C1-RP30-IGF | 1-1 (cys.) | 1-1 | ND | ND | + | | + | |
| RP30-IGF-12-RP30-IGF | 1-1 (cys.) | 2-2 | ND | ND | | + | | + |
| RP30-IGF-12-RP31-IGF | 1-2 (cys.) | 2-2 | ND | ND | + | | + | |
| RP31-IGF-12-RP30-IGF | 2-1 (cys.) | 2-2 | ND | ND | + | | + | |
| RP6-D8B12 | 1-2 (cys.) | 2-2 | ND | ND | + | | + | |

ND = Not Done;
+ = Effect observed;
No = No effect observed;
Cys. = contains putative cysteine loop.

[0492] Incorporated herein by reference in its entirety is the Sequence Listing for the application, comprising SEQ ID NO:1 to SEQ ID NO:2227. The Sequence Listing is disclosed on three CD-ROMs, designated “CRF”, “Copy 1”, and “Copy 2”. The Sequence Listing is a computer-readable ASCII file named “18784056PC.app.txt”, created on Sep. 23, 2002, in IBM-PC machine format, on a MS-Windows®98 operating system. The 18784056PC.app.txt file is 927,477 bytes in size.

[0493] As various changes can be made in the above compositions and methods without departing from the scope and spirit of the invention, it is intended that all subject matter contained in the above description, shown in the accompanying drawings, or defined in the appended claims be interpreted as illustrative, and not in a limiting sense.

[0494] The contents of all patents, patent applications, published articles, books, reference manuals, texts and abstracts cited herein are hereby incorporated by reference in their entirety to more fully describe the state of the art to which the present invention pertains.

The application's sequence listing, which the Patent Office published only in electronic form, follows.

SEQUENCE LISTING (2274 sequences)

SEQ ID NO: 1 - protein, 40 aa, Artificial Sequence
  Description of Artificial Sequence: Synthetic peptide
IRDMHYVWVQDRDRYINGVRQWYISDRYNPGSAFYRWFID

SEQ ID NO: 2 - protein, 40 aa, Artificial Sequence
  Description of Artificial Sequence: Synthetic peptide
RMGLQALAHYRKSAGPIFLSSGSVIKGSEGDPFYAWFRLQ

SEQ ID NO: 3 - protein, 40 aa, Artificial Sequence
  Description of Artificial Sequence: Synthetic peptide
MPVSLFRRVWDYRDGEHETLESHYVVPQAALDRLFYSWFS

SEQ ID NO: 4 - protein, 40 aa, Artificial Sequence
  Description of Artificial Sequence: Synthetic peptide
PLYGGGIHLYYPGTMGYVPGFPRQVKVLGDADKNFYDWFM

SEQ ID NO: 5 - protein, 39 aa, Artificial Sequence
  Description of Artificial Sequence: Synthetic peptide
YRGMLVLGRISDGAGKVASEPPARIGQKVFAVNFYDWFV

SEQ ID NO: 6 - protein, 39 aa, Artificial Sequence
  Description of Artificial Sequence: Synthetic peptide
SGCCRLLGLRWMFIVIVGWSGALVCQSAASAAGFYDWFV

SEQ ID NO: 7 - protein, 21 aa, Artificial Sequence
  Description of Artificial Sequence: Synthetic peptide
IGGQGQHQDGNFYDWFVEALA

SEQ ID NO: 8 - protein, 20 aa, Artificial Sequence
  Description of Artificial Sequence: Synthetic peptide
VFWNCRSQQLDFYEWFEQAA

SEQ ID NO: 9 - protein, 26 aa, Artificial Sequence
  Description of Artificial Sequence: Synthetic peptide
RVAGAISAPGLVSNKQDGLFYSWFRE

SEQ ID NO: 10 - protein, 20 aa, Artificial Sequence
  Description of Artificial Sequence: Synthetic peptide
VLQARHGCDSVSDCFYEWFA

SEQ ID NO: 11 - protein, 20 aa, Artificial Sequence
  Description of Artificial Sequence: Synthetic peptide
GAFYRWFHEALVGSERVPDV

SEQ ID NO: 12 - protein, 20 aa, Artificial Sequence
  Description of Artificial Sequence: Synthetic peptide
HEAFYDWFSALVDGGYELMG

SEQ ID NO: 13 - protein, 20 aa, Artificial Sequence
  Description of Artificial Sequence: Synthetic peptide
RIGGGWARSEGFYEWFVREL

SEQ ID NO: 14 - protein, 20 aa, Artificial Sequence
  Description of Artificial Sequence: Synthetic peptide
  MOD_RES (7): Unknown amino acid
  MOD_RES (11): Unknown amino acid
LPAGGAXGFAXRGFYEWFES

SEQ ID NO: 15 - protein, 20 aa, Artificial Sequence
  Description of Artificial Sequence: Synthetic peptide
GHSWALVRHVDRLFYEWFDL

SEQ ID NO: 16 - protein, 20 aa, Artificial Sequence
  Description of Artificial Sequence: Synthetic peptide
LGTSAGQGVGHRAFYQWFQS

SEQ ID NO: 17 - protein, 20 aa, Artificial Sequence
  Description of Artificial Sequence: Synthetic peptide
RGGGTFYEWFESALRKHGAG

SEQ ID NO: 18 - protein, 20 aa, Artificial Sequence
  Description of Artificial Sequence: Synthetic peptide
NSSGQQVVGLTFYSWFASQV

SEQ ID NO: 19 - protein, 20 aa, Artificial Sequence
  Description of Artificial Sequence: Synthetic peptide
FYGWFSRQLSLTPRDDWGLP

SEQ ID NO: 20 - protein, 20 aa, Artificial Sequence
  Description of Artificial Sequence: Synthetic peptide
RMFYEWFWSQMGAGPTEGSA

SEQ ID NO: 21 - protein, 21 aa, Artificial Sequence
  Description of Artificial Sequence: Synthetic peptide
IGGQGQHQDGNFYDWFVEALA

SEQ ID NO: 22 - protein, 20 aa, Artificial Sequence
  Description of Artificial Sequence: Synthetic peptide
RDKPTDQEEQNWSFYEWFRH

SEQ ID NO: 23 - protein, 20 aa, Artificial Sequence
  Description of Artificial Sequence: Synthetic peptide
WSALLSVMDTGFYAWFDDAV

SEQ ID NO: 24 - protein, 20 aa, Artificial Sequence
  Description of Artificial Sequence: Synthetic peptide
SRDQTNFTFNSAGFYGWFER

SEQ ID NO: 25 - protein, 17 aa, Artificial Sequence
  Description of Artificial Sequence: Synthetic peptide
GVGTLTMSSDAFYTWFV

SEQ ID NO: 26 - protein, 16 aa, Artificial Sequence
  Description of Artificial Sequence: Synthetic peptide
IGGSFVEFYGWFNDQV

SEQ ID NO: 27 - protein, 20 aa, Artificial Sequence
  Description of Artificial Sequence: Synthetic peptide
DIGSDGHGRRWDSFYRWFEM

SEQ ID NO: 28 - protein, 20 aa, Artificial Sequence
  Description of Artificial Sequence: Synthetic peptide
VLQARHGCDSVSDCFYEWFA

SEQ ID NO: 29 - protein, 20 aa, Artificial Sequence
  Description of Artificial Sequence: Synthetic peptide
DPERMQSDVGFYEWFRAAVG

SEQ ID NO: 30 - protein, 20 aa, Artificial Sequence
  Description of Artificial Sequence: Synthetic peptide
DPERMQSDVGFYEWFRAAVG

SEQ ID NO: 31 - protein, 20 aa, Artificial Sequence
  Description of Artificial Sequence: Synthetic peptide
DIGSDGHGRRWDSFYRWFEM

SEQ ID NO: 32 - protein, 20 aa, Artificial Sequence
  Description of Artificial Sequence: Synthetic peptide
PFYQWFLDQSVGGSRGGGLR

SEQ ID NO: 33 - protein, 20 aa, Artificial Sequence
  Description of Artificial Sequence: Synthetic peptide
AVAPLSVRGRDSGFYSWFSS

SEQ ID NO: 34 - protein, 21 aa, Artificial Sequence
  Description of Artificial Sequence: Synthetic peptide
  MOD_RES (1)..(10): Variable amino acid
  MOD_RES (18)..(21): Variable amino acid
XXXXXXXXXXNFYDWFVXXXX

SEQ ID NO: 35 - protein, 21 aa, Artificial Sequence
  Description of Artificial Sequence: Synthetic peptide
GRVDWLQRNANFYDWFVAELG

SEQ ID NO: 36 - protein, 21 aa, Artificial Sequence
  Description of Artificial Sequence: Synthetic peptide
RMYFSTGAPQNFYDWFVQEWD

SEQ ID NO: 37 - protein, 21 aa, Artificial Sequence
  Description of Artificial Sequence: Synthetic peptide
HHTQGLQVQRNFYDWFVNELR

SEQ ID NO: 38 - protein, 21 aa, Artificial Sequence
  Description of Artificial Sequence: Synthetic peptide
MHRMQHDGTSNFYDWFVLQWA

SEQ ID NO: 39 - protein, 21 aa, Artificial Sequence
  Description of Artificial Sequence: Synthetic peptide
AMHVVAQGGPNFYDWFVRELR

SEQ ID NO: 40 - protein, 21 aa, Artificial Sequence
  Description of Artificial Sequence: Synthetic peptide
AIQMNGNLAFNFYDWFVRELT

SEQ ID NO: 41 - protein, 21 aa, Artificial Sequence
  Description of Artificial Sequence: Synthetic peptide
TDRKSVQEPRNFYDWFVWAAR

SEQ ID NO: 42 - protein, 21 aa, Artificial Sequence
  Description of Artificial Sequence: Synthetic peptide
PHGHRGFAQSNFYDWFVTQEE

SEQ ID NO: 43 - protein, 21 aa, Artificial Sequence
  Description of Artificial Sequence: Synthetic peptide
RLASASVPGQNFYDWFVDQLL

SEQ ID NO: 44 - protein, 21 aa, Artificial Sequence
  Description of Artificial Sequence: Synthetic peptide
RQSEFSTLNSNFYDWFVRELE

SEQ ID NO: 45 - protein, 21 aa, Artificial Sequence
  Description of Artificial Sequence: Synthetic peptide
GQAQLSIRDVNFYDWFVQQLV

SEQ ID NO: 46 - protein, 21 aa, Artificial Sequence
  Description of Artificial Sequence: Synthetic peptide
MSEPAVGVNGNFYDWFVAQLF

SEQ ID NO: 47 - protein, 21 aa, Artificial Sequence
  Description of Artificial Sequence: Synthetic peptide
VGTGRARLDRNFYDWFVGQYS

SEQ ID NO: 48 - protein, 21 aa, Artificial Sequence
  Description of Artificial Sequence: Synthetic peptide
SREAVQKRNANFYDWFVQQLS

SEQ ID NO: 49 - protein, 21 aa, Artificial Sequence
  Description of Artificial Sequence: Synthetic peptide
LAQFAGSRNQNFYDWFVEQLG

SEQ ID NO: 50 - protein, 21 aa, Artificial Sequence
  Description of Artificial Sequence: Synthetic peptide
GQEYFDQMGLNFYDWFVRELD

SEQ ID NO: 51 - protein, 21 aa, Artificial Sequence
  Description of Artificial Sequence: Synthetic peptide
RQPSQPPHGSNFYDWFVEAIN

SEQ ID NO: 52 - protein, 21 aa, Artificial Sequence
  Description of Artificial Sequence: Synthetic peptide
LMQSLGSGSTNFYDWFVQQMV

SEQ ID NO: 53 - protein, 21 aa, Artificial Sequence
  Description of Artificial Sequence: Synthetic peptide
DQQRSACDGTNFYDWFVCQLS

SEQ ID NO: 54 - protein, 21 aa, Artificial Sequence
  Description of Artificial Sequence: Synthetic peptide
LDGTKACQRVNFYDWFVCQTE

SEQ ID NO: 55 - protein, 21 aa, Artificial Sequence
  Description of Artificial Sequence: Synthetic peptide
PEARRTVVHSNFYDWFVAQLS

SEQ ID NO: 56 - protein, 21 aa, Artificial Sequence
  Description of Artificial Sequence: Synthetic peptide
PWMLSVGIQDNFYDWFVGLDS

SEQ ID NO: 57 - protein, 21 aa, Artificial Sequence
  Description of Artificial Sequence: Synthetic peptide
ASHQRGGSSDNFYDWFVAQMR

SEQ ID NO: 58 - protein, 21 aa, Artificial Sequence
  Description of Artificial Sequence: Synthetic peptide
TLEREGEFSGNFYDWFVEQLH

SEQ ID NO: 59 - protein, 21 aa, Artificial Sequence
  Description of Artificial Sequence: Synthetic peptide
DRQSIGSVHGDFYDWFVSALG

SEQ ID NO: 60 - protein, 21 aa, Artificial Sequence
  Description of Artificial Sequence: Synthetic peptide
DWDKLGSLSENFYDWFVDQLA

SEQ ID NO: 61 - protein, 21 aa, Artificial Sequence
  Description of Artificial Sequence: Synthetic peptide
VRVVLNQSGRNFYDWFVIQLE

SEQ ID NO: 62 - protein, 21 aa, Artificial Sequence
  Description of Artificial Sequence: Synthetic peptide
MASWQSRTPDNFYDWFVRELS

SEQ ID NO: 63 - protein, 21 aa, Artificial Sequence
  Description of Artificial Sequence: Synthetic peptide
TTCHPRGEDCNFYDWFVLQLR

SEQ ID NO: 64 - protein, 21 aa, Artificial Sequence
  Description of Artificial Sequence: Synthetic peptide
VRGNDSVLRANFYDWFVDQLS

SEQ ID NO: 65 - protein, 21 aa, Artificial Sequence
  Description of Artificial Sequence: Synthetic peptide
TPRSQVRSDHNFYDWFVYQLA

SEQ ID NO: 66 - protein, 21 aa, Artificial Sequence
  Description of Artificial Sequence: Synthetic peptide
ESLTGSRPDRNFYDWFVQQTS

SEQ ID NO: 67 - protein, 21 aa, Artificial Sequence
  Description of Artificial Sequence: Synthetic peptide
PQSLTEVRTGNFYDWFVVQLH

SEQ ID NO: 68 - protein, 21 aa, Artificial Sequence
  Description of Artificial Sequence: Synthetic peptide
DVGMGRVKETNFYDWFVRQLI

SEQ ID NO: 69 - protein, 21 aa, Artificial Sequence
  Description of Artificial Sequence: Synthetic peptide
GADDIRSLNTNFYDWFVNQLS

SEQ ID NO: 70 - protein, 21 aa, Artificial Sequence
  Description of Artificial Sequence: Synthetic peptide
GVSIQAGYKTNFYDWFVEAVR

SEQ ID NO: 71 - protein, 21 aa, Artificial Sequence
  Description of Artificial Sequence: Synthetic peptide
VGEHRQMSVGNFYDWFVMQIA

SEQ ID NO: 72 - protein, 21 aa, Artificial Sequence
  Description of Artificial Sequence: Synthetic peptide
GSSLGRSGPGNFYDWFVDQLE

SEQ ID NO: 73 - protein, 21 aa, Artificial Sequence
  Description of Artificial Sequence: Synthetic peptide
HRQQDVVRQGNFYDWFVQALE

SEQ ID NO: 74 - protein, 21 aa, Artificial Sequence
  Description of Artificial Sequence: Synthetic peptide
QDTFLTAREGNFYDWFIRALE

SEQ ID NO: 75 - protein, 21 aa, Artificial Sequence
  Description of Artificial Sequence: Synthetic peptide
EAIMREEGQANFYDWFVRQLE

SEQ ID NO: 76 - protein, 21 aa, Artificial Sequence
  Description of Artificial Sequence: Synthetic peptide
VCDVSTGGGTNFYDWFVCQVG

SEQ ID NO: 77 - protein, 21 aa, Artificial Sequence
  Description of Artificial Sequence: Synthetic peptide
PQPRSASTPLNFYDWFVQATG

SEQ ID NO: 78 - protein, 21 aa, Artificial Sequence
  Description of Artificial Sequence: Synthetic peptide
GVSRGSGGDPNFYDWFVMQLR

SEQ ID NO: 79 - protein, 21 aa, Artificial Sequence
  Description of Artificial Sequence: Synthetic peptide
GPGRHDSSRGNFYDWFVEQLA

SEQ ID NO: 80 - protein, 21 aa, Artificial Sequence
  Description of Artificial Sequence: Synthetic peptide
ERFALEVQGSNFYDWFVRQVI

SEQ ID NO: 81 - protein, 20 aa, Artificial Sequence
  Description of Artificial Sequence: Synthetic peptide
NLKSSATVGGNFYDWFVEQL

SEQ ID NO: 82 - protein, 21 aa, Artificial Sequence
  Description of Artificial Sequence: Synthetic peptide
MEGPPAGGPLNFYDWFVAQVD

SEQ ID NO: 83 - protein, 21 aa, Artificial Sequence
  Description of Artificial Sequence: Synthetic peptide
RLDVAGHRGGNFYDWFVKQLH

SEQ ID NO: 84 - protein, 21 aa, Artificial Sequence
  Description of Artificial Sequence: Synthetic peptide
PWSDHEALNQNFYDWFVSQVL

SEQ ID NO: 85 - protein, 21 aa, Artificial Sequence
  Description of Artificial Sequence: Synthetic peptide
EDRLGNGESTNFYDWFVRQLA

SEQ ID NO: 86 - protein, 21 aa, Artificial Sequence
  Description of Artificial Sequence: Synthetic peptide
GKLVASTLDDNFYDWFVRQLS

SEQ ID NO: 87 - protein, 21 aa, Artificial Sequence
  Description of Artificial Sequence: Synthetic peptide
SGPVVQTQNGNFYDWFVHQLR

SEQ ID NO: 88 - protein, 21 aa, Artificial Sequence
  Description of Artificial Sequence: Synthetic peptide
VDRAGPAGSDNFYDWFVAQLD

SEQ ID NO: 89 - protein, 21 aa, Artificial Sequence
  Description of Artificial Sequence: Synthetic peptide
SLGRNDRPDENFYDWFVSQVQ

SEQ ID NO: 90 - protein, 21 aa, Artificial Sequence
  Description of Artificial Sequence: Synthetic peptide
RVMATANAPMNFYDWFVVQLQ

SEQ ID NO: 91 - protein, 21 aa, Artificial Sequence
  Description of Artificial Sequence: Synthetic peptide
NGVERAGTGDNFYDWFVAQLH

SEQ ID NO: 92 - protein, 21 aa, Artificial Sequence
  Description of Artificial Sequence: Synthetic peptide
PFAGKGDKTGNFYDWFVSLTG

SEQ ID NO: 93 - protein, 21 aa, Artificial Sequence
  Description of Artificial Sequence: Synthetic peptide
GMPQEYMDQVNFYDWFVAQVD

SEQ ID NO: 94 - protein, 21 aa, Artificial Sequence
  Description of Artificial Sequence: Synthetic peptide
MGTPAVGDGANFYDWFVRQLG

SEQ ID NO: 95 - protein, 21 aa, Artificial Sequence
  Description of Artificial Sequence: Synthetic peptide
SKCKAWYGANNFYDWFVWQVD

SEQ ID NO: 96 - protein, 21 aa, Artificial Sequence
  Description of Artificial Sequence: Synthetic peptide
EAASLGSQDRNFYDWFVRQVV

SEQ ID NO: 97 - protein, 21 aa, Artificial Sequence
  Description of Artificial Sequence: Synthetic peptide
VERSASSQDGNFYDWFVVQIR

SEQ ID NO: 98 - protein, 21 aa, Artificial Sequence
  Description of Artificial Sequence: Synthetic peptide
TSEVQRRSQDNFYDWFVAQVA

SEQ ID NO: 99 - protein, 21 aa, Artificial Sequence
  Description of Artificial Sequence: Synthetic peptide
ERSAAGFREGNFYDWFVAQVN

SEQ ID NO: 100 - protein, 21 aa, Artificial Sequence
  Description of Artificial Sequence: Synthetic peptide
RAERGSMRDSNFYDWFVQQLP

SEQ ID NO: 101 - protein, 21 aa, Artificial Sequence
  Description of Artificial Sequence: Synthetic peptide
LAMSVASRPANFYDWFVAQIV

SEQ ID NO: 102 - protein, 21 aa, Artificial Sequence
  Description of Artificial Sequence: Synthetic peptide
HNSSSPMRTGNFYDWFVQELR

SEQ ID NO: 103 - protein, 20 aa, Artificial Sequence
  Description of Artificial Sequence: Synthetic peptide
SALSGPVQPINFYDWFVTGM

SEQ ID NO: 104 - protein, 21 aa, Artificial Sequence
  Description of Artificial Sequence: Synthetic peptide
GAQAIREIHHNFYDWFVAQVT

SEQ ID NO: 105 - protein, 21 aa, Artificial Sequence
  Description of Artificial Sequence: Synthetic peptide
RGQRESDSGTNFYDWFVGAIR

SEQ ID NO: 106 - protein, 21 aa, Artificial Sequence
  Description of Artificial Sequence: Synthetic peptide
VQEGLSGMEGNFYDWFVDQLF

SEQ ID NO: 107 - protein, 21 aa, Artificial Sequence
  Description of Artificial Sequence: Synthetic peptide
RLDRSSTSGVNFYDWFVAQVG

SEQ ID NO: 108 - protein, 21 aa, Artificial Sequence
  Description of Artificial Sequence: Synthetic peptide
GSQHSGREPHNFYDWFVAQVG

SEQ ID NO: 109 - protein, 21 aa, Artificial Sequence
  Description of Artificial Sequence: Synthetic peptide
GRGDQRHETTNFYDWFVRELQ

SEQ ID NO: 110 - protein, 21 aa, Artificial Sequence
  Description of Artificial Sequence: Synthetic peptide
PRMVEKPSEDNFYDWFVTQLS

SEQ ID NO: 111 - protein, 21 aa, Artificial Sequence
  Description of Artificial Sequence: Synthetic peptide
RVGIQVDPHTNFYDWFVIQLT

SEQ ID NO: 112 - protein, 21 aa, Artificial Sequence
  Description of Artificial Sequence: Synthetic peptide
RSSGGLLSQGNFYDWFVSQLE

SEQ ID NO: 113 - protein, 21 aa, Artificial Sequence
  Description of Artificial Sequence: Synthetic peptide
SDARQAGLQENFYDWFVSQVR

SEQ ID NO: 114 - protein, 21 aa, Artificial Sequence
  Description of Artificial Sequence: Synthetic peptide
PPYRSSRLGENFYDWFVMQVR

SEQ ID NO: 115 - protein, 21 aa, Artificial Sequence
  Description of Artificial Sequence: Synthetic peptide
QEVTRTRDDKNFYDWFVSQIF

SEQ ID NO: 116 - protein, 21 aa, Artificial Sequence
  Description of Artificial Sequence: Synthetic peptide
SRAPYGSTAGNFYDWFVQAVS

SEQ ID NO: 117 - protein, 21 aa, Artificial Sequence
  Description of Artificial Sequence: Synthetic peptide
  MOD_RES (1): Unknown amino acid
XDGQSVSSKGNFYDWFVQQMT

SEQ ID NO: 118 - protein, 21 aa, Artificial Sequence
  Description of Artificial Sequence: Synthetic peptide
RLMGGIAEPQNFYDWFVREVA

SEQ ID NO: 119 - protein, 21 aa, Artificial Sequence
  Description of Artificial Sequence: Synthetic peptide
SAGHHMPRESNFYDWFVDQVV

SEQ ID NO: 120 - protein, 21 aa, Artificial Sequence
  Description of Artificial Sequence: Synthetic peptide
LGAAETWDGINFYDWFVKQVS

SEQ ID NO: 121 - protein, 21 aa, Artificial Sequence
  Description of Artificial Sequence: Synthetic peptide
VGHSGVPPYPNFYDWFVMQVS

SEQ ID NO: 122 - protein, 21 aa, Artificial Sequence
  Description of Artificial Sequence: Synthetic peptide
VTMLDKGAQDNFYDWFVREVA

SEQ ID NO: 123 - protein, 21 aa, Artificial Sequence
  Description of Artificial Sequence: Synthetic peptide
HHSPGNEHGYNFYDWFVLQVA

SEQ ID NO: 124 - protein, 21 aa, Artificial Sequence
  Description of Artificial Sequence: Synthetic peptide
GSIAQLIMRANFYDWFVEQTN

SEQ ID NO: 125 - protein, 21 aa, Artificial Sequence
  Description of Artificial Sequence: Synthetic peptide
LKGSSQPLSVNFYDWFVQQIK

SEQ ID NO: 126 - protein, 21 aa, Artificial Sequence
  Description of Artificial Sequence: Synthetic peptide
PASNKNSLAENFYDWFVQQTR

SEQ ID NO: 127 - protein, 21 aa, Artificial Sequence
  Description of Artificial Sequence: Synthetic peptide
HVEHMAVGDGNFYDWFVVQLR

SEQ ID NO: 128 - protein, 21 aa, Artificial Sequence
  Description of Artificial Sequence: Synthetic peptide
RGMTGMVGRGNFYDWFVGQLR

SEQ ID NO: 129 - protein, 21 aa, Artificial Sequence
  Description of Artificial Sequence: Synthetic peptide
GLRSEQGNRLNFYDWFVAQIA

SEQ ID NO: 130 - protein, 21 aa, Artificial Sequence
  Description of Artificial Sequence: Synthetic peptide
RVREKLPRPENFYDWFVNQIH

SEQ ID NO: 131 - protein, 21 aa, Artificial Sequence
  Description of Artificial Sequence: Synthetic peptide
SNPSRQDASVNFYDWFVREVA

SEQ ID NO: 132 - protein, 21 aa, Artificial Sequence
  Description of Artificial Sequence: Synthetic peptide
QSVDLSRPDSNFYDWFVEVLS

SEQ ID NO: 133 - protein, 21 aa, Artificial Sequence
  Description of Artificial Sequence: Synthetic peptide
IGGQGQHQDGNFYDWFVEALA

SEQ ID NO: 134 - protein, 21 aa, Artificial Sequence
  Description of Artificial Sequence: Synthetic peptide
VEVQRHIRKDNFYDWFVKQID

SEQ ID NO: 135 - protein, 21 aa, Artificial Sequence
  Description of Artificial Sequence: Synthetic peptide
CWARPCGDAANFYDWFVQQAS

SEQ ID NO: 136 - protein, 21 aa, Artificial Sequence
  Description of Artificial Sequence: Synthetic peptide
RHERGKEGPGNFYDWFVSQVV

SEQ ID NO: 137 - protein, 21 aa, Artificial Sequence
  Description of Artificial Sequence: Synthetic peptide
ERSPRPALASNFYDWFVQQVV

SEQ ID NO: 138 - protein, 21 aa, Artificial Sequence
  Description of Artificial Sequence: Synthetic peptide
IARMRETFQPNFYDWFVDQLA

SEQ ID NO: 139 - protein, 21 aa, Artificial Sequence
  Description of Artificial Sequence: Synthetic peptide
GRGQGLKRPDNFYDWFVAAAK

SEQ ID NO: 140 - protein, 21 aa, Artificial Sequence
  Description of Artificial Sequence: Synthetic peptide
YSIEVQDWNENFYDWFVSQLG

SEQ ID NO: 141 - protein, 21 aa, Artificial Sequence
  Description of Artificial Sequence: Synthetic peptide
TWMWEERKQDNFYDWFVGQLK

SEQ ID NO: 142 - protein, 21 aa, Artificial Sequence
  Description of Artificial Sequence: Synthetic peptide
VTFTSAVFHENFYDWFVRQVS

SEQ ID NO: 143 - protein, 21 aa, Artificial Sequence
  Description of Artificial Sequence: Synthetic peptide
LAINDLVTHKNFYDWFVDQLR

SEQ ID NO: 144 - protein, 21 aa, Artificial Sequence
  Description of Artificial Sequence: Synthetic peptide
GAVGLAEAGPNFYDWFVSQVQ

SEQ ID NO: 145 - protein, 21 aa, Artificial Sequence
  Description of Artificial Sequence: Synthetic peptide
RYRGERHDGRNFYDWFVEQVN

SEQ ID NO: 146 - protein, 21 aa, Artificial Sequence
  Description of Artificial Sequence: Synthetic peptide
QGAEGRLSEGNFYDWFVQAVS

SEQ ID NO: 147 - protein, 21 aa, Artificial Sequence
  Description of Artificial Sequence: Synthetic peptide
PRLHMGSDMGDFYDWFVVQIA

SEQ ID NO: 148 - protein, 21 aa, Artificial Sequence
  Description of Artificial Sequence: Synthetic peptide
IVAGARHSEVNFYDWFVIQVR

SEQ ID NO: 149 - protein, 21 aa, Artificial Sequence
  Description of Artificial Sequence: Synthetic peptide
AELVGAGVRGNFYDWFVDQLV

SEQ ID NO: 150 - protein, 21 aa, Artificial Sequence
  Description of Artificial Sequence: Synthetic peptide
DSSRLWLGERNFYDWFVAQIS

SEQ ID NO: 151 - protein, 21 aa, Artificial Sequence
  Description of Artificial Sequence: Synthetic peptide
VGQVGRYVRSNFYDWFVQQAM

SEQ ID NO: 152 - protein, 21 aa, Artificial Sequence
  Description of Artificial Sequence: Synthetic peptide
RPQLVESGSKNFYDWFVQVVR

SEQ ID NO: 153 - protein, 21 aa, Artificial Sequence
  Description of Artificial Sequence: Synthetic peptide
RIHNQTERGGNFYDWFVHQLV

SEQ ID NO: 154 - protein, 21 aa, Artificial Sequence
  Description of Artificial Sequence: Synthetic peptide
EMYGDTSERVNFYDWFVSALQ

SEQ ID NO: 155 - protein, 21 aa, Artificial Sequence
  Description of Artificial Sequence: Synthetic peptide
RVGSGMEDLGNFYDWFVRQAQ

SEQ ID NO: 156 - protein, 21 aa, Artificial Sequence
  Description of Artificial Sequence: Synthetic peptide
KDPVTVSQGRNFYDWFVVQIQ

SEQ ID NO: 157 - protein, 22 aa, Artificial Sequence
  Description of Artificial Sequence: Synthetic peptide
DARDHGVWVMSNFYDWFVAQVS

SEQ ID NO: 158 - protein, 21 aa, Artificial Sequence
  Description of Artificial Sequence: Synthetic peptide
VATVHVGGGMNFYDWFVAQVG

SEQ ID NO: 159 - protein, 21 aa, Artificial Sequence
  Description of Artificial Sequence: Synthetic peptide
CADPGACSSLNFYDWFVQMRG

SEQ ID NO: 160 - protein, 21 aa, Artificial Sequence
  Description of Artificial Sequence: Synthetic peptide
NPTSVQQYGVNFYDWFVNVLS

SEQ ID NO: 161 - protein, 21 aa, Artificial Sequence
  Description of Artificial Sequence: Synthetic peptide
RPSLPEVRPGNFYDWFVQSVR

SEQ ID NO: 162 - protein, 21 aa, Artificial Sequence
  Description of Artificial Sequence: Synthetic peptide
SLQGADFQQGNFYDWFVSELA

SEQ ID NO: 163 - protein, 21 aa, Artificial Sequence
  Description of Artificial Sequence: Synthetic peptide
LSSRGRVTMRNFYDWFVAQVV

SEQ ID NO: 164 - protein, 21 aa, Artificial Sequence
  Description of Artificial Sequence: Synthetic peptide
HKSWTTMSPLNFYDWFVAQVE

SEQ ID NO: 165 - protein, 21 aa, Artificial Sequence
  Description of Artificial Sequence: Synthetic peptide
RPVIGGGGTRNFYDWFVAQMI

SEQ ID NO: 166 - protein, 21 aa, Artificial Sequence
  Description of Artificial Sequence: Synthetic peptide
YDQDPPYWGLNFYDWFVREVA

SEQ ID NO: 167 - protein, 39 aa, Artificial Sequence; identical to SEQ ID NO: 5
  Description of Artificial Sequence: Synthetic peptide

SEQ ID NO: 168 - protein, 39 aa, Artificial Sequence
  Description of Artificial Sequence: Synthetic peptide
QRGMLVRGRISHGAGKIAYEPPDCLGQKACAVNFYDWFV

SEQ ID NO: 169 - protein, 39 aa, Artificial Sequence
  Description of Artificial Sequence: Synthetic peptide
QRGMLLLGRISDDAGKVASEPSARRGQKVFAFNFYDWFV

SEQ ID NO: 170 - protein, 38 aa, Artificial Sequence
  Description of Artificial Sequence: Synthetic peptide
YRGILVLGRISEGAGKVASEPAARIGQKVFADFYDWFV

SEQ ID NO: 171 - protein, 39 aa, Artificial Sequence
  Description of Artificial Sequence: Synthetic peptide
QRGMLALGRISDGAGKVASEPPAGIGQKVFAFNFYDWFV

SEQ ID NO: 172 - protein, 39 aa, Artificial Sequence
  Description of Artificial Sequence: Synthetic peptide
FRGRLVLGHFSDGAGKVGSEPAARIGQKVFDVNFYDWFV

SEQ ID NO: 173 - protein, 39 aa, Artificial Sequence
  Description of Artificial Sequence: Synthetic peptide
YRGMLVLGRISDGAGKVASEPPARIGQEVFADNFYDWFV

SEQ ID NO: 174 - protein, 39 aa, Artificial Sequence
  Description of Artificial Sequence: Synthetic peptide
YRGMLVLGRISDGAGEVASEPPARIGQEVFALNFYDWFV

SEQ ID NO: 175 - protein, 39 aa, Artificial Sequence
  Description of Artificial Sequence: Synthetic peptide
VPWYAGSGSSSDGAGKVASEPPARIDQKVFAVNFYDWFV

SEQ ID NO: 176 - protein, 39 aa, Artificial Sequence
  Description of Artificial Sequence: Synthetic peptide
YRGQLVLGRISYGAGKVGCDPPARIGQKDWAVNFYDWFV

SEQ ID NO: 177 - protein, 39 aa, Artificial Sequence
  Description of Artificial Sequence: Synthetic peptide
QRGLLVLGRFSDGAGNVASEPPAGIGQEVFPVNFYDWFV

SEQ ID NO: 178 - protein, 39 aa, Artificial Sequence
  Description of Artificial Sequence: Synthetic peptide
QRGMLVLGRISDGAGKVAAEPPDCLGQKVCAVNFYDWFV

SEQ ID NO: 179 - protein, 39 aa, Artificial Sequence
  Description of Artificial Sequence: Synthetic peptide
QRGMRVLGRISDGAGKVASELPPRIGQKDFAVNFYDWFV

SEQ ID NO: 180 - protein, 39 aa, Artificial Sequence
  Description of Artificial Sequence: Synthetic peptide
QRGMLVLGSISDGAGKVAYEAPARIGQTVFAVNFYDWFV

SEQ ID NO: 181 - protein, 39 aa, Artificial Sequence
  Description of Artificial Sequence: Synthetic peptide
QPWCAGSGRIYDGACKVASEPPAHIGQEVFAVNFYDWFV

SEQ ID NO: 182 - protein, 39 aa, Artificial Sequence
  Description of Artificial Sequence: Synthetic peptide
QRGMLVLDRISDGAGKVASGPPARIGQNVLAVNFYDWFV

SEQ ID NO: 183 - protein, 39 aa, Artificial Sequence
  Description of Artificial Sequence: Synthetic peptide
YRGMLVVGRISDGTGKVASQPPARIGQKVFAVNFYDWFV

SEQ ID NO: 184 - protein, 39 aa, Artificial Sequence
  Description of Artificial Sequence: Synthetic peptide
YRGMLVLGRISDGAGKVASVPPAHIGQKVFAFNFYDWFV

SEQ ID NO: 185 - protein, 39 aa, Artificial Sequence
  Description of Artificial Sequence: Synthetic peptide
QHGMLVLGRVSVGAGKVPSEPQARIGHKVFDVNFYDWFV

SEQ ID NO: 186 - protein, 39 aa, Artificial Sequence
  Description of Artificial Sequence: Synthetic peptide
YSGYAGSGSFSDGAGKVASEPPARISQEVLADNFYDWFV

SEQ ID NO: 187 - protein, 39 aa, Artificial Sequence
  Description of Artificial Sequence: Synthetic peptide
YRGMLVLGRISDGAGKVASEPPARIGQKVSAVNFYDWFV

SEQ ID NO: 188 - protein, 39 aa, Artificial Sequence
  Description of Artificial Sequence: Synthetic peptide
YHGKLDLGRISVGVGKVASEPPARIGQKVFADNFYDWFV

SEQ ID NO: 189 - protein, 40 aa, Artificial Sequence
  Description of Artificial Sequence: Synthetic peptide
YRGQAGSGVGSLTVAGKVASDPPARIGQKVFADNFYDWFV

SEQ ID NO: 190 - protein, 39 aa, Artificial Sequence
  Description of Artificial Sequence: Synthetic peptide
HRGMLVLGRISEGAGNVDPEPPARIGQNVFAGNFYDWFV

SEQ ID NO: 191 - protein, 39 aa, Artificial Sequence
  Description of Artificial Sequence: Synthetic peptide
QRGMPVLGRISDGAGKVGSEPPARIARKVFPVNFYDWFI

SEQ ID NO: 192 - protein, 39 aa, Artificial Sequence
  Description of Artificial Sequence: Synthetic peptide
QGGLLVTGRISDGAGKVASEPPGGIGQKVFAGNFYDWFV

SEQ ID NO: 193 - protein, 39 aa, Artificial Sequence
  Description of Artificial Sequence: Synthetic peptide
YPWYGGSGTYLDGAGKVASEPPARIDQQVFAGNFYDWFV

SEQ ID NO: 194 - protein, 39 aa, Artificial Sequence
  Description of Artificial Sequence: Synthetic peptide
YRAMLVLRRISDVAGIVDSEPPTRIGQKVFAGNFYDWFV

SEQ ID NO: 195 - protein, 39 aa, Artificial Sequence
  Description of Artificial Sequence: Synthetic peptide
YRGMLVLGRISQGAGNVASEPSSRIGQKVFAGNFYDWFI

SEQ ID NO: 196 - protein, 39 aa, Artificial Sequence
  Description of Artificial Sequence: Synthetic peptide
YRGMLVLGRISDGAGKVDYEPPARIGQKVFAGNFYDWFV

SEQ ID NO: 197 - protein, 39 aa, Artificial Sequence
  Description of Artificial Sequence: Synthetic peptide
YRGMLGLGGISAGAGIVASEPPARVGQKVFAGNFYDWFV

SEQ ID NO: 198 - protein, 39 aa, Artificial Sequence
  Description of Artificial Sequence: Synthetic peptide
YRGILFQGRIPDGAGKVASEPPTRIGERVFAVNFYDWFV

SEQ ID NO: 199 - protein, 39 aa, Artificial Sequence
  Description of Artificial Sequence: Synthetic peptide
QGGMPVLGRISDGAGKVAFEPPARIGQKVFAGNFYDWFV

SEQ ID NO: 200 - protein, 39 aa, Artificial Sequence
  Description of Artificial Sequence: Synthetic peptide
YRGMLVLGRIQDGAGKVASEPPARIGQKVFTGNFYDWFV

SEQ ID NO: 201 - protein, 39 aa, Artificial Sequence
  Description of Artificial Sequence: Synthetic peptide
QRGMLVLGGVSDGAGKVASDPPASIGQNVFAVNFYDWFV

SEQ ID NO: 202 - protein, 39 aa, Artificial Sequence
  Description of Artificial Sequence: Synthetic peptide
YPGMLILDRISDGASKVVSEPPASIGQKVFAVNFYDWFV

SEQ ID NO: 203 - protein, 39 aa, Artificial Sequence
  Description of Artificial Sequence: Synthetic peptide
YRGMLVLDRISDGAGKVASEQPARIGQEVYAVNFYDWFV

SEQ ID NO: 204 - protein, 39 aa, Artificial Sequence
  Description of Artificial Sequence: Synthetic peptide
YRGMLDLGRISGGVGKVASESPARIGQKVYAVNFYDWFV

SEQ ID NO: 205 - protein, 32 aa, Artificial Sequence
  Description of Artificial Sequence: Synthetic peptide
QRGMMVLGRISDGAGEVASEKVFAVNFYDWFV

SEQ ID NO: 206 - protein, 39 aa, Artificial Sequence
  Description of Artificial Sequence: Synthetic peptide
QRGMLVLGRVSDGAGKVDSAPPARIGQKVFAGNFYDWFV

SEQ ID NO: 207 - protein, 39 aa, Artificial Sequence
  Description of Artificial Sequence: Synthetic peptide
QRGMLVLGRMSDGAGKVAFEPPARIGQRGFAGNFYDWFV

SEQ ID NO: 208 - protein, 39 aa, Artificial Sequence
  Description of Artificial Sequence: Synthetic peptide
QRGTLVLGRISDGAGKAASEPPARIGQNVFAVNFYDWFV

SEQ ID NO: 209 - protein, 39 aa, Artificial Sequence
  Description of Artificial Sequence: Synthetic peptide
QRGMLVLDRISDGAGKVAAEPPARIGQKVFALNFYDWFI

SEQ ID NO: 210 - protein, 39 aa, Artificial Sequence
  Description of Artificial Sequence: Synthetic peptide
QRGMLVLGRISDGAGEVASEPPARIGEKVYAVNFYDWFV

SEQ ID NO: 211 - protein, 39 aa, Artificial Sequence
  Description of Artificial Sequence: Synthetic peptide
QRGILVRGRISDGAGKVGSEPPARSGEKVFAVNFYDWFI

SEQ ID NO: 212 - protein, 39 aa, Artificial Sequence
  Description of Artificial Sequence: Synthetic peptide
QLGMVVLGRISDGSGKAASEPAARISQKVFAVNFYDWFV

SEQ ID NO: 213 - protein, 39 aa, Artificial Sequence
  Description of Artificial Sequence: Synthetic peptide
QRGMLVLGRISDGDGKVASEPPARIGQRVFAVNFYDWFV

SEQ ID NO: 214 - protein, 39 aa, Artificial Sequence
  Description of Artificial Sequence: Synthetic peptide
YRGMLVLGRSSDGAGKVAFERPARIGQTVFAVNFYDWFV

SEQ ID NO: 215 - protein, 39 aa, Artificial Sequence
  Description of Artificial Sequence: Synthetic peptide
  MOD_RES (16): Unknown amino acid; translation read-through at TAA stop codon
YRGMLVLGRISDGAGXVASEPPARIGRKVFAVNFYDWFV

SEQ ID NO: 216 - protein, 39 aa, Artificial Sequence
  Description of Artificial Sequence: Synthetic peptide
YRGMLVLGRISGGAGKAASERPARIGQKVSAVNFYDWFV

SEQ ID NO: 217 - protein, 39 aa, Artificial Sequence
  Description of Artificial Sequence: Synthetic peptide
YRGMMVQGRISDGAGKVASVSPVRIGQKVIAVNFYDWFV

SEQ ID NO: 218 - protein, 39 aa, Artificial Sequence
  Description of Artificial Sequence: Synthetic peptide
YRGRLGLGRISDVAGKVACDPSARIGQKVLPVNFYDWFV

SEQ ID NO: 219 - protein, 39 aa, Artificial Sequence
  Description of Artificial Sequence: Synthetic peptide
YRGMLVLGRISDGAGRVASEPQARIGQKVFAVNFYDWFV

SEQ ID NO: 220 - protein, 39 aa, Artificial Sequence
  Description of Artificial Sequence: Synthetic peptide
QGGMLVPGRISDGAGKVASQPPARIGPKGFAGNFYDWFV

SEQ ID NO: 221 - protein, 39 aa, Artificial Sequence
  Description of Artificial Sequence: Synthetic peptide
YRGMRVLGRISDGAGKVASEPPTHIGQKVFPVNFYDWFV

SEQ ID NO: 222 - protein, 39 aa, Artificial Sequence
  Description of Artificial Sequence: Synthetic peptide
YRGMLVLGRISDGAGKVGSEPAARIGQKVFALNFYDWFV

SEQ ID NO: 223 - protein, 40 aa, Artificial Sequence
  Description of Artificial Sequence: Synthetic peptide
YRGQGMVLGRISDGAGKVASEPPGRIGQKVFPVNFYDWFV

SEQ ID NO: 224 - protein, 39 aa, Artificial Sequence
  Description of Artificial Sequence: Synthetic peptide
YRGMLGLGRITGGAGKVASEPPDRIGQHVFVDNFYDWFV

SEQ ID NO: 225 - protein, 38 aa, Artificial Sequence
  Description of Artificial Sequence: Synthetic peptide
DGMLVLGRISDGAGNVASEAPARIGQKVFAVNFYDWFV

SEQ ID NO: 226 - protein, 39 aa, Artificial Sequence
  Description of Artificial Sequence: Synthetic peptide
YRGMRVRGRISDGAGKAASDPRARIGQTVLDVNFYDWFV

SEQ ID NO: 227 - protein, 39 aa, Artificial Sequence
  Description of Artificial Sequence: Synthetic peptide
YRGMWVLGRISYGAGKVAYEPPARMGQKGFAVNFYDWFV

SEQ ID NO: 228 - protein, 39 aa, Artificial Sequence
  Description of Artificial Sequence: Synthetic peptide
YRGMLVGGRIAGGAGIVASEPPARIGQKVFAVNFYDWFV

SEQ ID NO: 229 - protein, 39 aa, Artificial Sequence
  Description of Artificial Sequence: Synthetic peptide
YRGLLGLGGISDGAGKVASEPPARNGQKVFAVNFYDWFV

SEQ ID NO: 230 - protein, 39 aa, Artificial Sequence
  Description of Artificial Sequence: Synthetic peptide
YRGMLGLGRISAGAGKVASGAPARIGQEDFAVNFYDWFV

SEQ ID NO: 231 - protein, 39 aa, Artificial Sequence
  Description of Artificial Sequence: Synthetic peptide
YRGMLALGRISEGAGKVASEPPARIGQNVFAVNFYDWFV

SEQ ID NO: 232 - protein, 39 aa, Artificial Sequence
  Description of Artificial Sequence: Synthetic peptide
YRGMLVLGRISDGAGKVASEPPARIGQKVLAVNFYDWFV

SEQ ID NO: 233 - protein, 39 aa, Artificial Sequence
  Description of Artificial Sequence: Synthetic peptide
YPGMLVPGRISDGAGEGATDPPPRIGQKVFAFNFYDWFV

SEQ ID NO: 234 - protein, 39 aa, Artificial Sequence
  Description of Artificial Sequence: Synthetic peptide
YRGMLVPGRISDGAGKVAYEPPARIGQKIFAVNFYDWFV

SEQ ID NO: 235 - protein, 39 aa, Artificial Sequence
  Description of Artificial Sequence: Synthetic peptide
YRGVLVLGRVSDGVGKVASEPPAHRGQRVFGVNFYDWFV

SEQ ID NO: 236 - protein, 39 aa, Artificial Sequence
  Description of Artificial Sequence: Synthetic peptide
YRRMLVLGRISDGAANVASGPPDRIGQKVFAGNFYDWFV

SEQ ID NO: 237 - protein, 39 aa, Artificial Sequence
  Description of Artificial Sequence: Synthetic peptide
YRRMLALGRFSDVTGDVASEPPAHIGQKVVAVNFYDWFV

SEQ ID NO: 238 - protein, 39 aa, Artificial Sequence
  Description of Artificial Sequence: Synthetic peptide
YRGMVVRGRIFDGPGKVASEPRARIGQKVFAVNFYDWFV

SEQ ID NO: 239 - protein, 39 aa, Artificial Sequence
  Description of Artificial Sequence: Synthetic peptide
YRGMLILGRISDGAGKVASEPPARVGQDVVAVNFYDWFV

SEQ ID NO: 240 - protein, 39 aa, Artificial Sequence
  Description of Artificial Sequence: Synthetic peptide
YPGRLVGGRISDGVGKVASEPPGRIGQKVFAVNFYDWFV

SEQ ID NO: 241 - protein, 39 aa, Artificial Sequence
  Description of Artificial Sequence: Synthetic peptide
QRGLLVLGRIFDGAGKVASDPPARIGQKDFADNFYDWFV

SEQ ID NO: 242 - protein, 39 aa, Artificial Sequence
  Description of Artificial Sequence: Synthetic peptide
YRGMLVLGRISDGAGKVAFEPPARIGQNVFAVNFYDWFV

SEQ ID NO: 243 - protein, 39 aa, Artificial Sequence
  Description of Artificial Sequence: Synthetic peptide
  MOD_RES (16): Unknown amino acid; translation read-through at TAA stop codon
YRCMPVLGRISDGAGXVASDRPARIGQKVFAVNFYDWFV

SEQ ID NO: 244 - protein, 39 aa, Artificial Sequence
  Description of Artificial Sequence: Synthetic peptide
YRGRLVLGRISDGAGKVAAEPPASMDSKVFAGNFYDWFV

SEQ ID NO: 245 - protein, 16 aa, Artificial Sequence
  Description of Artificial Sequence: Synthetic peptide
GFREGNFYDWFVAQVT

SEQ ID NO: 246 - protein, 16 aa, Artificial Sequence
  Description of Artificial Sequence: Synthetic peptide
GFREGQRWYWFVAQVT

SEQ ID NO: 247 - protein, 16 aa, Artificial Sequence
  Description of Artificial Sequence: Synthetic peptide
GFREGYFYDWFLAQVT

SEQ ID NO: 248 - protein, 16 aa, Artificial Sequence
  Description of Artificial Sequence: Synthetic peptide
GFREGDFYEWFVAQVT

SEQ ID NO: 249 - protein, 16 aa, Artificial Sequence
  Description of Artificial Sequence: Synthetic peptide
GFREGQFYEWFAAQVT

SEQ ID NO: 250 - protein, 16 aa, Artificial Sequence
  Description of Artificial Sequence: Synthetic peptide
GFREGTFYDWFVAQVT

SEQ ID NO: 251 - protein, 16 aa, Artificial Sequence
  Description of Artificial Sequence: Synthetic peptide
GFREGNFYDWFEAQVT

SEQ ID NO: 252 - protein, 16 aa, Artificial Sequence
  Description of Artificial Sequence: Synthetic peptide
GFREGAFYDWFEAQVT

SEQ ID NO: 253 - protein, 16 aa, Artificial Sequence
  Description of Artificial Sequence: Synthetic peptide
GFREGAFYDWFVAQVT

SEQ ID NO: 254 - protein, 16 aa, Artificial Sequence
  Description of Artificial Sequence: Synthetic peptide
GFREGKFYQWFEAQVT

SEQ ID NO: 255 - protein, 16 aa, Artificial Sequence
  Description of Artificial Sequence: Synthetic peptide
GFREGDFYDWFQAQVT

SEQ ID NO: 256 - protein, 16 aa, Artificial Sequence
  Description of Artificial Sequence: Synthetic peptide
GFREGTFYEWFVAQVT

SEQ ID NO: 257 - protein, 16 aa, Artificial Sequence
  Description of Artificial Sequence: Synthetic peptide
GFREGNFYDWFVAQVT

SEQ ID NO: 258 - protein, 16 aa, Artificial Sequence
  Description of Artificial Sequence: Synthetic peptide
GFREGQFYEWFLAQVT

SEQ ID NO: 259 - protein, 16 aa, Artificial Sequence
  Description of Artificial Sequence: Synthetic peptide
GFREGQFYDWFLAQVT

SEQ ID NO: 260 - protein, 16 aa, Artificial Sequence
  Description of Artificial Sequence: Synthetic peptide
GFREGEFYDWFQAQVT

SEQ ID NO: 261 - protein, 16 aa, Artificial Sequence
  Description of Artificial Sequence: Synthetic peptide
GFREGQFYDWFRAQVT

SEQ ID NO: 262 - protein, 16 aa, Artificial Sequence
  Description of Artificial Sequence: Synthetic peptide
GFREGYFYEWFQAQVT

SEQ ID NO: 263 - protein, 16 aa, Artificial Sequence
  Description of Artificial Sequence: Synthetic peptide
GFREGDFYQWFEAQVT

SEQ ID NO: 264 - protein, 16 aa, Artificial Sequence
  Description of Artificial Sequence: Synthetic peptide
GFREGSFYGWFQAQVT

SEQ ID NO: 265 - protein, 16 aa, Artificial Sequence
  Description of Artificial Sequence: Synthetic peptide
GFREGSFYAWFQAQVT

SEQ ID NO: 266 - protein, 16 aa, Artificial Sequence
  Description of Artificial Sequence: Synthetic peptide
GFREGQFYDWFVAQVT

SEQ ID NO: 267 - protein, 16 aa, Artificial Sequence
  Description of Artificial Sequence: Synthetic peptide
GFREGIFYEWFVAQVT

SEQ ID NO: 268 - protein, 16 aa, Artificial Sequence
  Description of Artificial Sequence: Synthetic peptide
GFREGSFYEWFQAQVT

SEQ ID NO: 269 - protein, 16 aa, Artificial Sequence
  Description of Artificial Sequence: Synthetic peptide
GFREGNFYDWFAAQVT

SEQ ID NO: 270 - protein, 16 aa, Artificial Sequence
  Description of Artificial Sequence: Synthetic peptide
GFREGSFYDWFVAQVT

SEQ ID NO: 271 - protein, 16 aa, Artificial Sequence
  Description of Artificial Sequence: Synthetic peptide
GFREGDFYDWFVAQVT

SEQ ID NO: 272 - protein, 16 aa, Artificial Sequence
  Description of Artificial Sequence: Synthetic peptide
GFREGDFYQWFVAQVT

SEQ ID NO: 273 - protein, 16 aa, Artificial Sequence
  Description of Artificial Sequence: Synthetic peptide
GFREGGFYDWFVAQVT

SEQ ID NO: 274 - protein, 16 aa, Artificial Sequence
  Description of Artificial Sequence: Synthetic peptide
GFREGDFYGWFQAQVT

SEQ ID NO: 275 - protein, 16 aa, Artificial Sequence
  Description of Artificial Sequence: Synthetic peptide
GFREGVFYDWFVAQVT

SEQ ID NO: 276 - protein, 16 aa, Artificial Sequence
  Description of Artificial Sequence: Synthetic peptide
GFREGGFYEWFQAQVT

SEQ ID NO: 277 - protein, 16 aa, Artificial Sequence
  Description of Artificial Sequence: Synthetic peptide
GFREGSFYDWFQAQVT

SEQ ID NO: 278 - protein, 16 aa, Artificial Sequence
  Description of Artificial Sequence: Synthetic peptide
GFREGNFYEWFQAQVT

SEQ ID NO: 279 - protein, 16 aa, Artificial Sequence
  Description of Artificial Sequence: Synthetic peptide
GFREGKFYDWFLAQVT

SEQ ID NO: 280 - protein, 16 aa, Artificial Sequence
  Description of Artificial Sequence: Synthetic peptide
GFREGEFYEWFVAQVT

SEQ ID NO: 281 - protein, 16 aa, Artificial Sequence
  Description of Artificial Sequence: Synthetic peptide
GFREGRFYDWFVAQVT

SEQ ID NO: 282 - protein, 16 aa, Artificial Sequence
  Description of Artificial Sequence: Synthetic peptide
GFREGTFYDWFVAQVT

SEQ ID NO: 283 - protein, 16 aa, Artificial Sequence
  Description of Artificial Sequence: Synthetic peptide
GFREGEFYEWFAAQVT

SEQ ID NO: 284 - protein, 16 aa, Artificial Sequence
  Description of Artificial Sequence: Synthetic peptide
GFREGDFYEWFEAQVT

SEQ ID NO: 285 - protein, 16 aa, Artificial Sequence
  Description of Artificial Sequence: Synthetic peptide
  MOD_RES (12): Unknown amino acid
GFREGHFYDWFXAQVT

SEQ ID NO: 286 - protein, 16 aa, Artificial Sequence
  Description of Artificial Sequence: Synthetic peptide
GFREGEFYDWFVAQVT

SEQ ID NO: 287 - protein, 16 aa, Artificial Sequence
  Description of Artificial Sequence: Synthetic peptide
GFREGSFYDWFVAQVT

SEQ ID NO: 288 - protein, 16 aa, Artificial Sequence
  Description of Artificial Sequence: Synthetic peptide
GFREGSFYDWFGAQVT

SEQ ID NO: 289 - protein, 16 aa, Artificial Sequence
  Description of Artificial Sequence: Synthetic peptide
GFREGTFYDWFQAQVT

SEQ ID NO: 290 - protein, 16 aa, Artificial Sequence
  Description of Artificial Sequence: Synthetic peptide
GFREGNFYEWFTAQVT

SEQ ID NO: 291 - protein, 16 aa, Artificial Sequence
  Description of Artificial Sequence: Synthetic peptide
GFREGSFYNWFQAQVT

SEQ ID NO: 292 - protein, 16 aa, Artificial Sequence
  Description of Artificial Sequence: Synthetic peptide
GFREGNFYDWFVAQVT

SEQ ID NO: 293 - protein, 16 aa, Artificial Sequence
  Description of Artificial Sequence: Synthetic peptide
GFREGDFYDWFVAQVT

SEQ ID NO: 294 - protein, 16 aa, Artificial Sequence
  Description of Artificial Sequence: Synthetic peptide
GFREGAFYDWFAAQVT

SEQ ID NO: 295 - protein, 16 aa, Artificial Sequence
  Description of Artificial Sequence: Synthetic peptide
GFREGSFYDWFEAQVT

SEQ ID NO: 296 - protein, 16 aa, Artificial Sequence
  Description of Artificial Sequence: Synthetic peptide
GFREGSFYDWFAAQVT

SEQ ID NO: 297 - protein, 16 aa, Artificial Sequence
  Description of Artificial Sequence: Synthetic peptide
GFREGSFYEWFDAQVT

SEQ ID NO: 298 - protein, 16 aa, Artificial Sequence
  Description of Artificial Sequence: Synthetic peptide
GFREGAFYDWFEAQVT

SEQ ID NO: 299 - protein, 16 aa, Artificial Sequence
  Description of Artificial Sequence: Synthetic peptide
GFREGQFYDWFAAQVT

SEQ ID NO: 300 - protein, 16 aa, Artificial Sequence
  Description of Artificial Sequence: Synthetic peptide
GFREGNFYDWFAAQVT

SEQ ID NO: 301 - protein, 16 aa, Artificial Sequence
  Description of Artificial Sequence: Synthetic peptide
GFREGDFYDWFAAQVT

SEQ ID NO: 302 - protein, 16 aa, Artificial Sequence
  Description of Artificial Sequence: Synthetic peptide
GFREGSFYEWFEAQVT

SEQ ID NO: 303 - protein, 16 aa, Artificial Sequence
  Description of Artificial Sequence: Synthetic peptide
GFREGGFYDWFLAQVT

SEQ ID NO: 304 - protein, 16 aa, Artificial Sequence
  Description of Artificial Sequence: Synthetic peptide
GFREGGFYAWFAAQVT

SEQ ID NO: 305 - protein, 16 aa, Artificial Sequence
  Description of Artificial Sequence: Synthetic peptide
  MOD_RES (12): Unknown amino acid
GFREGGFYEWFXAQVT

SEQ ID NO: 306 - protein, 16 aa, Artificial Sequence
  Description of Artificial Sequence: Synthetic peptide
GFREGDFYDWFRAQVT

SEQ ID NO: 307 - protein, 16 aa, Artificial Sequence
  Description of Artificial Sequence: Synthetic peptide
GFREGSFYDWFVAQVT

SEQ ID NO: 308 - protein, 16 aa, Artificial Sequence
  Description of Artificial Sequence: Synthetic peptide
GFREGDFYGWFQAQVT

SEQ ID NO: 309 - protein, 16 aa, Artificial Sequence
  Description of Artificial Sequence: Synthetic peptide
GFREGGFYDWFQAQVT

SEQ ID NO: 310 - protein, 16 aa, Artificial Sequence
  Description of Artificial Sequence: Synthetic peptide
GFREGDFYDWFVAQVT

SEQ ID NO: 311 - protein, 16 aa, Artificial Sequence
  Description of Artificial Sequence: Synthetic peptide
GFREGDFYDWFQAQVT

SEQ ID NO: 312 - protein, 16 aa, Artificial Sequence
  Description of Artificial Sequence: Synthetic peptide
GFREGGFYDWFVAQVT

SEQ ID NO: 313 - protein, 16 aa, Artificial Sequence
  Description of Artificial Sequence: Synthetic peptide
GFREGDFYDWFAAQVT

SEQ ID NO: 314 - protein, 16 aa, Artificial Sequence
  Description of Artificial Sequence: Synthetic peptide
GFREGNFYDWFQAQVT

SEQ ID NO: 315 - protein, 16 aa, Artificial Sequence
  Description of Artificial Sequence: Synthetic peptide
GFREGNFYDWFLAQVT

SEQ ID NO: 316 - protein, 16 aa, Artificial Sequence
  Description of Artificial Sequence: Synthetic peptide
GFREGHFYDWFQAQVT

SEQ ID NO: 317 - protein, 16 aa, Artificial Sequence
  Description of Artificial Sequence: Synthetic peptide
GFREGQFYEWFEAQVT

SEQ ID NO: 318 - protein, 16 aa, Artificial Sequence
  Description of Artificial Sequence: Synthetic peptide
GFREGSFYEWFQAQVT

SEQ ID NO: 319 - protein, 16 aa, Artificial Sequence
  Description of Artificial Sequence: Synthetic peptide
GFREGDFYDWFLAQVT

SEQ ID NO: 320 - protein, 16 aa, Artificial Sequence
  Description of Artificial Sequence: Synthetic peptide
GFREGHFYDWFVAQVT

SEQ ID NO: 321 - protein, 16 aa, Artificial Sequence
  Description of Artificial Sequence: Synthetic peptide
GFREGQFYEWFVAQVT

SEQ ID NO: 322 - protein, 16 aa, Artificial Sequence
  Description of Artificial Sequence: Synthetic peptide
GFREGQFYDWFAAQVT

SEQ ID NO: 323 - protein, 16 aa, Artificial Sequence
  Description of Artificial Sequence: Synthetic peptide
GFREGQFYDWFVAQVT

SEQ ID NO: 324 - protein, 16 aa, Artificial Sequence
  Description of Artificial Sequence: Synthetic peptide
GFREGDFYQWFAAQVT

SEQ ID NO: 325 - protein, 16 aa, Artificial Sequence
  Description of Artificial Sequence: Synthetic peptide
GFREGNFYDWFVAQVT

SEQ ID NO: 326 - protein, 16 aa, Artificial Sequence
  Description of Artificial Sequence: Synthetic peptide
GFRDGSFYDWFVAQVT

SEQ ID NO: 327 - protein, 16 aa, Artificial Sequence
  Description of Artificial Sequence: Synthetic peptide
GFREGHFYEWFQAQVT

SEQ ID NO: 328 - protein, 16 aa, Artificial Sequence
  Description of Artificial Sequence: Synthetic peptide
GFREGDFYDWFSAQVT

SEQ ID NO: 329 - protein, 16 aa, Artificial Sequence
  Description of Artificial Sequence: Synthetic peptide
GFREGHFYDWFDAQVT

SEQ ID NO: 330 - protein, 16 aa, Artificial Sequence
  Description of Artificial Sequence: Synthetic peptide
GFREGYFYDWFKAQVT

SEQ ID NO: 331 - protein, 16 aa, Artificial Sequence
  Description of Artificial Sequence: Synthetic peptide
GFREGHFYDWFEAQVT

SEQ ID NO: 332 - protein, 16 aa, Artificial Sequence
  Description of Artificial Sequence: Synthetic peptide
GFREGDFYDWFEAQVT

SEQ ID NO: 333 - protein, 16 aa, Artificial Sequence
  Description of Artificial Sequence: Synthetic peptide
GFREGTFYDWFVAQVT

SEQ ID NO: 334 - protein, 16 aa, Artificial Sequence
  Description of Artificial Sequence: Synthetic peptide
GFREGDYYGWFEAQVT

SEQ ID NO: 335 - protein, 16 aa, Artificial Sequence
  Description of Artificial Sequence: Synthetic peptide
GFREGDFYAWFMAQVT

SEQ ID NO: 336 - protein, 16 aa, Artificial Sequence
  Description of Artificial Sequence: Synthetic peptide
GFREGNFYEWFLAQVT

SEQ ID NO: 337 - protein, 16 aa, Artificial Sequence
  Description of Artificial Sequence: Synthetic peptide
GFREGSFYDWFDAQVT

SEQ ID NO: 338 - protein, 16 aa, Artificial Sequence
  Description of Artificial Sequence: Synthetic peptide
GFREGNFYDQFVAQVT

SEQ ID NO: 339 - protein, 16 aa, Artificial Sequence
  Description of Artificial Sequence: Synthetic peptide
GFREGHFYEWFAAQVT

SEQ ID NO: 340 - protein, 16 aa, Artificial Sequence
  Description of Artificial Sequence: Synthetic peptide
GFREGNFYEWFVAQVT

SEQ ID NO: 341 - protein, 16 aa, Artificial Sequence
  Description of Artificial Sequence: Synthetic peptide
GFREGKFYDWFVAQVT

SEQ ID NO: 342 - protein, 16 aa, Artificial Sequence
  Description of Artificial Sequence: Synthetic peptide
GFREGMFDVQLLAQVT

SEQ ID NO: 343 - protein, 26 aa, Artificial Sequence
  Description of Artificial Sequence: Synthetic peptide
  MOD_RES (1)..(6): Variable amino acid
  MOD_RES (21)..(26): Variable amino acid
XXXXXXFHENFYDWFVRQVSXXXXXX

SEQ ID NO: 344 - protein, 21 aa, Artificial Sequence
  Description of Artificial Sequence: Synthetic peptide
VTFTSAVFHENFYDWFVRQVS

SEQ ID NO: 345 - protein, 26 aa, Artificial Sequence
  Description of Artificial Sequence: Synthetic peptide
TYKARFLHENFYDWFNRQVSQYFGRV

SEQ ID NO: 346 - protein, 24 aa, Artificial Sequence
  Description of Artificial Sequence: Synthetic peptide
QRLSLHEQFYDWFVGQVSPLGAGG

SEQ ID NO: 347 - protein, 26 aa, Artificial Sequence
  Description of Artificial Sequence: Synthetic peptide
GGGKVNFHEDFYGWFVQQFSGVGSDR

SEQ ID NO: 348 - protein, 26 aa, Artificial Sequence
  Description of Artificial Sequence: Synthetic peptide
LVGDAPFHEDFYDWFARQVFGCCQEQ

SEQ ID NO: 349 - protein, 26 aa, Artificial Sequence
  Description of Artificial Sequence: Synthetic peptide
TGAEVSFHENFYDWFDRQYSSWLDRD

SEQ ID NO: 350 - protein, 26 aa, Artificial Sequence
  Description of Artificial Sequence: Synthetic peptide
QPHSSRLHESFYDWFDRQVPWYALDR

SEQ ID NO: 351 - protein, 26 aa, Artificial Sequence
  Description of Artificial Sequence: Synthetic peptide
SRALAAVHEQFYDWFVRQVSGLDWGY

SEQ ID NO: 352 - protein, 26 aa, Artificial Sequence
  Description of Artificial Sequence: Synthetic peptide
QPKDGTLHENFYDWFVRQVSSSGWVG

SEQ ID NO: 353 - protein, 26 aa, Artificial Sequence
  Description of Artificial Sequence: Synthetic peptide
RGRLIQLHEDFYDWFLRQVSGMGGGS

SEQ ID NO: 354 - protein, 26 aa, Artificial Sequence
  Description of Artificial Sequence: Synthetic peptide
QRGAPKSDENFYDWFVRQVLRFGEND

SEQ ID NO: 355 - protein, 26 aa, Artificial Sequence
  Description of Artificial Sequence: Synthetic peptide
AARTSLFHEDFYEWFDRQVRQEGMWG

SEQ ID NO: 356 - protein, 26 aa, Artificial Sequence
  Description of Artificial Sequence: Synthetic peptide
GTSNHSLHENFYDWFVRQLSSVQSSG

SEQ ID NO: 357 - protein, 26 aa, Artificial Sequence
  Description of Artificial Sequence: Synthetic peptide
VSHVHLFHENFYDWFVRQLAAEGFSG

SEQ ID NO: 358 - protein, 26 aa, Artificial Sequence
  Description of Artificial Sequence: Synthetic peptide
GRQDSGLHEHFYDWFSRQVQGEVALG

SEQ ID NO: 359 - protein, 26 aa, Artificial Sequence
  Description of Artificial Sequence: Synthetic peptide
SNDERQFHETFYDWFVRQVSADGADR

SEQ ID NO: 360 - protein, 26 aa, Artificial Sequence
  Description of Artificial Sequence: Synthetic peptide
LSTEQRFHEKFYDWFVHQVSTSGGGT

SEQ ID NO: 361 - protein, 26 aa, Artificial Sequence
  Description of Artificial Sequence: Synthetic peptide
SLSREQFHENFYDWFARQVSELEGVV

SEQ ID NO: 362 - protein, 26 aa, Artificial Sequence
  Description of Artificial Sequence: Synthetic peptide
IPGRRSLHENFYDWFVRQVSPGGGSA

SEQ ID NO: 363 - protein, 26 aa, Artificial Sequence
  Description of Artificial Sequence: Synthetic peptide
TQKAQSLDEKFYDWFVRQVSGGGLTG

SEQ ID NO: 364 - protein, 26 aa, Artificial Sequence
  Description of Artificial Sequence: Synthetic peptide
VSQLSDFHENFYGWFARQIAGQAEWT

SEQ ID NO: 365 - protein, 26 aa, Artificial Sequence
  Description of Artificial Sequence: Synthetic peptide
NGTSQALHQNFYDWFAQQISGSEPGP

SEQ ID NO: 366 - protein, 26 aa, Artificial Sequence
  Description of Artificial Sequence: Synthetic peptide
VGQSVTFHGDFYDWFDRQLSGSQEFG

SEQ ID NO: 367 - protein, 26 aa, Artificial Sequence
  Description of Artificial Sequence: Synthetic peptide
TIDHHPLHEQFYDWFARQVSDLESLG

SEQ ID NO: 368 - protein, 26 aa, Artificial Sequence
  Description of Artificial Sequence: Synthetic peptide
PNVGYAFHENFYDWFIRQVSIEEKAG

SEQ ID NO: 369 - protein, 26 aa, Artificial Sequence
  Description of Artificial Sequence: Synthetic peptide
SRGSGVFHESFYNWFDRQVSEWIQFG

SEQ ID NO: 370 - protein, 26 aa, Artificial Sequence
  Description of Artificial Sequence: Synthetic peptide
QPVSGSVHERFYDWFVRQVSGSAGGG

SEQ ID NO: 371 - protein, 26 aa, Artificial Sequence
  Description of Artificial Sequence: Synthetic peptide
ASQLPPVYENFYEWFDRQVSLDAQRE

SEQ ID NO: 372 - protein, 26 aa, Artificial Sequence
  Description of Artificial Sequence: Synthetic peptide
VSGRGAFHENFYDWFVRQVFRDEQDT

SEQ ID NO: 373 - protein, 26 aa, Artificial Sequence
  Description of Artificial Sequence: Synthetic peptide
ARPPPTVHENFYDWFVRQVSETWRQD

SEQ ID NO: 374 - protein, 26 aa, Artificial Sequence
  Description of Artificial Sequence: Synthetic peptide
QGGDRLFHERFYDWFDRLVSSDSTGE

SEQ ID NO: 375 - protein, 26 aa, Artificial Sequence
  Description of Artificial Sequence: Synthetic peptide
QHIAAGLHENFYDWFIRQVSGVNVPA

SEQ ID NO: 376 - protein, 26 aa, Artificial Sequence
  Description of Artificial Sequence: Synthetic peptide
QPNDGLLHENFYDWFVRQVSNAVDGG

SEQ ID NO: 377 - protein, 26 aa, Artificial Sequence
  Description of Artificial Sequence: Synthetic peptide
PVEFTVYHDNFYDWFARQVSDGLGQF

SEQ ID NO: 378 - protein, 26 aa, Artificial Sequence
  Description of Artificial Sequence: Synthetic peptide
FCVQASIHENFYDWFVRQVAENQVFS

SEQ ID NO: 379 - protein, 26 aa, Artificial Sequence
  Description of Artificial Sequence: Synthetic peptide
GRPRGSFHENFYDWFARQVSGDGAGT

SEQ ID NO: 380 - protein, 26 aa, Artificial Sequence
  Description of Artificial Sequence: Synthetic peptide
IVGASLCHESFYDWFACQVTNLQSQG

SEQ ID NO: 381 - protein, 26 aa, Artificial Sequence
  Description of Artificial Sequence: Synthetic peptide
IGLRQMFHENFYDWFAREVSKEAGDG

SEQ ID NO: 382 - protein, 26 aa, Artificial Sequence
  Description of Artificial Sequence: Synthetic peptide
LGGAIEGHGNFYDWFVRQVSLDVGGE

SEQ ID NO: 383 - protein, 26 aa, Artificial Sequence
  Description of Artificial Sequence: Synthetic peptide
LNALQQLHENFYDWFGRQVSATPPGG

SEQ ID NO: 384 - protein, 26 aa, Artificial Sequence
  Description of Artificial Sequence: Synthetic peptide
VGNCDTFPENFYDWFACQVSELGGMN

SEQ ID NO: 385 - protein, 26 aa, Artificial Sequence
  Description of Artificial Sequence: Synthetic peptide
FSQDGNFHENFYDWFDRQLSLVGAGT

SEQ ID NO: 386 - protein, 26 aa, Artificial Sequence
  Description of Artificial Sequence: Synthetic peptide
PAGNRALHESFYDWFVRQVSEFQLGA

SEQ ID NO: 387 - protein, 26 aa, Artificial Sequence
  Description of Artificial Sequence: Synthetic peptide
DRLRARFNENFYDWFDRQVSGQGSMP

SEQ ID NO: 388 - protein, 26 aa, Artificial Sequence
  Description of Artificial Sequence: Synthetic peptide
VLGVAQFHDKFYDWFARQVSQLESAG

SEQ ID NO: 389 - protein, 26 aa, Artificial Sequence
  Description of Artificial Sequence: Synthetic peptide
GVVGGAFHEQFYDWFDRQVSAAFKGD

SEQ ID NO: 390 - protein, 26 aa, Artificial Sequence
  Description of Artificial Sequence: Synthetic peptide
DESEMRLHEQFYDWFARLVSLEGGSA

SEQ ID NO: 391 - protein, 26 aa, Artificial Sequence
  Description of Artificial Sequence: Synthetic peptide
EGGGVAIHENFYDWFDRQVSLQGWSD

SEQ ID NO: 392 - protein, 26 aa, Artificial Sequence
  Description of Artificial Sequence: Synthetic peptide
SRIVSRFHENFYDWFVRQVSGDAPVQ

SEQ ID NO: 393 - protein, 26 aa, Artificial Sequence
  Description of Artificial Sequence: Synthetic peptide
IPAGAQLHENFYDWFARQVSGEDGGA

SEQ ID NO: 394 - protein, 26 aa, Artificial Sequence
  Description of Artificial Sequence: Synthetic peptide
GSSAAGFDEQFYDWFDRQVSEAFRDG

SEQ ID NO: 395 - protein, 26 aa, Artificial Sequence
  Description of Artificial Sequence: Synthetic peptide
RLALRTFHQDFYDWFVRQVAAEDTDP

SEQ ID NO: 396 - protein, 26 aa, Artificial Sequence
  Description of Artificial Sequence: Synthetic peptide
QGSFAVLHENFYDWFARQVSGVEGLA

SEQ ID NO: 397 - protein, 26 aa, Artificial Sequence
  Description of Artificial Sequence: Synthetic peptide
QGNMSALHENFYDWFVRQVSEADRVD

SEQ ID NO: 398 - protein, 26 aa, Artificial Sequence
  Description of Artificial Sequence: Synthetic peptide
VAYPALLHEQFYDWFVRQVSAVAGTT

SEQ ID NO: 399 - protein, 26 aa, Artificial Sequence
  Description of Artificial Sequence: Synthetic peptide
PDTINSQHKNFYDWFVRQVSGVGTSS

SEQ ID NO: 400 - protein, 26 aa, Artificial Sequence
  Description of Artificial Sequence: Synthetic peptide
SEDVDSRHENFYDWFVRQVSGIGLQD

SEQ ID NO: 401 - protein, 26 aa, Artificial Sequence
  Description of Artificial Sequence: Synthetic peptide
PAPADAFDHNFYDWFARQLSATTTIQ

SEQ ID NO: 402 - protein, 26 aa, Artificial Sequence
  Description of Artificial Sequence: Synthetic peptide
MVQRISIHENFYDWFVRQISGSAVPP

SEQ ID NO: 403 - protein, 26 aa, Artificial Sequence
  Description of Artificial Sequence: Synthetic peptide
GNVRGQFHGQFYDWFARQVSGSEGDA

SEQ ID NO: 404 - protein, 26 aa, Artificial Sequence
  Description of Artificial Sequence: Synthetic peptide
PDAEKQFHETFYGWFVRQISEDSANS

SEQ ID NO: 405 - protein, 26 aa, Artificial Sequence
  Description of Artificial Sequence: Synthetic peptide
FGRGVHCDENFYDWFVCQVSGALLEG

SEQ ID NO: 406 - protein, 26 aa, Artificial Sequence
  Description of Artificial Sequence: Synthetic peptide
ETPLTELHEQFYDWFVRQVSGFPGGV

SEQ ID NO: 407 - protein, 26 aa, Artificial Sequence
  Description of Artificial Sequence: Synthetic peptide
QHRGPHFHEDFYDWFVRQVSSAVPSD

SEQ ID NO: 408 - protein, 26 aa, Artificial Sequence
  Description of Artificial Sequence: Synthetic peptide
RQDPGLFHDNFYDWFDRLVSAWDGQE

SEQ ID NO: 409 - protein, 26 aa, Artificial Sequence
  Description of Artificial Sequence: Synthetic peptide
QAAVGVCNKDFYAWFACQVREDFAKA

SEQ ID NO: 410 - protein, 26 aa, Artificial Sequence
  Description of Artificial Sequence: Synthetic peptide
RNWNLQFNENFYDWFDRQVSALRGGG

SEQ ID NO: 411 - protein, 26 aa, Artificial Sequence
  Description of Artificial Sequence: Synthetic peptide
RSEQYRFHENFYEWFDRQVSRMGLLG

SEQ ID NO: 412 - protein, 26 aa, Artificial Sequence
  Description of Artificial Sequence: Synthetic peptide
GAGGRDFDEDFYDWFVRQVSGQVTSG

SEQ ID NO: 413 - protein, 26 aa, Artificial Sequence
  Description of Artificial Sequence: Synthetic peptide
SPEGNLVHDQFYDWFVRQLSSTSAGT

SEQ ID NO: 414 - protein, 26 aa, Artificial Sequence
  Description of Artificial Sequence: Synthetic peptide
QGGLGDFDEDFYDWFARQVSRRDRAD

SEQ ID NO: 415 - protein, 26 aa, Artificial Sequence
  Description of Artificial Sequence: Synthetic peptide
LSQGVGFQENFYEWFERQVSGWDGRD

SEQ ID NO: 416 - protein, 26 aa, Artificial Sequence
  Description of Artificial Sequence: Synthetic peptide
VFERSRCHDNFYDWFFCQVSGQADGG

SEQ ID NO: 417 - protein, 26 aa, Artificial Sequence
  Description of Artificial Sequence: Synthetic peptide
LLASRAFHENFYDWFARQVSGTQPPG

SEQ ID NO: 418 - protein, 26 aa, Artificial Sequence
  Description of Artificial Sequence: Synthetic peptide
VPDAQIFHESFYDWFVRQASAGGPAD

SEQ ID NO: 419 - protein, 26 aa, Artificial Sequence
  Description of Artificial Sequence: Synthetic peptide
ANQMGRFHDNFYDWFDRQVSRYERGT

SEQ ID NO: 420 - protein, 26 aa, Artificial Sequence
  Description of Artificial Sequence: Synthetic peptide
PSRKDGLHQSFYDWFARQVQDMEGRA

SEQ ID NO: 421 - protein, 26 aa, Artificial Sequence
  Description of Artificial Sequence: Synthetic peptide
QAVTRRFHENFYDWFARQVSEEGGWS

SEQ ID NO: 422 - protein, 26 aa, Artificial Sequence
  Description of Artificial Sequence: Synthetic peptide
GYAVGQYQANFYDWFVRQVDGMSNGG

SEQ ID NO: 423 - protein, 26 aa, Artificial Sequence
  Description of Artificial Sequence: Synthetic peptide
GHQRDLLHESFYDWFVRQVSEAEGGG

SEQ ID NO: 424 - protein, 26 aa, Artificial Sequence
  Description of Artificial Sequence: Synthetic peptide
DRPSSFIHENFYEWFARQVSQSGSSG

SEQ ID NO: 425 - protein, 26 aa, Artificial Sequence
  Description of Artificial Sequence: Synthetic peptide
ERTAETLHEQFYDWFVRQVSAMDGES

SEQ ID NO: 426 - protein, 26 aa, Artificial Sequence
  Description of Artificial Sequence: Synthetic peptide
LTSQLLSHEDFYDWFVRQVSGVGGSG

SEQ ID NO: 427 - protein, 26 aa, Artificial Sequence
  Description of Artificial Sequence: Synthetic peptide
PDRSDRLDDNFYDWFVRQVSQVINED

SEQ ID NO: 428 - protein, 26 aa, Artificial Sequence
  Description of Artificial Sequence: Synthetic peptide
RAGGVGLHDNFYDWFVRQVSGGDSGP

SEQ ID NO: 429 - protein, 26 aa, Artificial Sequence
  Description of Artificial Sequence: Synthetic peptide
ADCYVQLHENFYDWFRRQVCNLQEGM

SEQ ID NO: 430 - protein, 26 aa, Artificial Sequence
  Description of Artificial Sequence: Synthetic peptide
RQGHAGFHDNFYDWFVRQVSGSTPQV

SEQ ID NO: 431 - protein, 21 aa, Artificial Sequence
  Description of Artificial Sequence: Synthetic peptide
VTFTSAVFHENFYDWFVRQVS

SEQ ID NO: 432 - protein, 26 aa, Artificial Sequence
  Description of Artificial Sequence: Synthetic peptide
GIISQSCPESFYDWFAGQVSDPWWCW

SEQ ID NO: 433 - protein, 26 aa, Artificial Sequence
  Description of Artificial Sequence: Synthetic peptide
VGRASGFPENFYDWFGRQLSLQSGEQ

SEQ ID NO: 434 - protein, 26 aa, Artificial Sequence
  Description of Artificial Sequence: Synthetic peptide
VGYQGQGDENFYDWFIRQVSGRLGVQ

SEQ ID NO: 435 - protein, 26 aa, Artificial Sequence
  Description of Artificial Sequence: Synthetic peptide
SACQFDCHENFYDWFARQVSGGAAYG

SEQ ID NO: 436 - protein, 26 aa, Artificial Sequence
  Description of Artificial Sequence: Synthetic peptide
SAAQLFFQESFYDWFLRQVAESSQPN

SEQ ID NO: 437 - protein, 26 aa, Artificial Sequence
  Description of Artificial Sequence: Synthetic peptide
AVRATRFDEAFYDWFVRQISDGQGNK

SEQ ID NO: 438 - protein, 26 aa, Artificial Sequence
  Description of Artificial Sequence: Synthetic peptide
VNQSGSIHENFYDWFERQVSHQRGVR

SEQ ID NO: 439 - protein, 26 aa, Artificial Sequence
  Description of Artificial Sequence: Synthetic peptide
APDPSDFQEIFYDWFVRQVSRMPGGG

SEQ ID NO: 440 - protein, 25 aa, Artificial Sequence
  Description of Artificial Sequence: Synthetic peptide
SSCDGAGHESFYEWFVRQVSGCRSV

SEQ ID NO: 441 - protein, 26 aa, Artificial Sequence
  Description of Artificial Sequence: Synthetic peptide
RAGSSDFHEDFYEWFVRQVSLSLKGK

SEQ ID NO: 442 - protein, 26 aa, Artificial Sequence
  Description of Artificial Sequence: Synthetic peptide
QAVQPGFHEEFYDWFVRQVSTGVGGG

SEQ ID NO: 443 - protein, 26 aa, Artificial Sequence
  Description of Artificial Sequence: Synthetic peptide
SSIGGGFHENFYDWFSRQLSQSPPLK

SEQ ID NO: 444 - protein, 26 aa, Artificial Sequence
  Description of Artificial Sequence: Synthetic peptide
QSPVGSSHEDFYDWFFRQVAQSGAHQ

SEQ ID NO: 445 - protein, 26 aa, Artificial Sequence
  Description of Artificial Sequence: Synthetic peptide
NYRRQVFNGNFYDWFDRQVFSLVTPG

SEQ ID NO: 446 - protein, 26 aa, Artificial Sequence
  Description of Artificial Sequence: Synthetic peptide
TLDGGSFEEQFYDWFVRQLSYRTNPD

SEQ ID NO: 447 - protein, 26 aa, Artificial Sequence
  Description of Artificial Sequence: Synthetic peptide
FYVQQWGHENFYDWFDRQVSQSGGAG

SEQ ID NO: 448 - protein, 26 aa, Artificial Sequence
  Description of Artificial Sequence: Synthetic peptide
LRRQAPVEENFYDWFVRQVSGDRVGG

SEQ ID NO: 449 - protein, 26 aa, Artificial Sequence
  Description of Artificial Sequence: Synthetic peptide
RCGRELYHSTFYDWFDRQVAGRTCPS

SEQ ID NO: 450 - protein, 26 aa, Artificial Sequence
  Description of Artificial Sequence: Synthetic peptide
CCLLCRFQQNFYDWFVCQGISRLRPL

SEQ ID NO: 451 - protein, 26 aa, Artificial Sequence
  Description of Artificial Sequence: Synthetic peptide
PPLASDLDVQFYGWFVQQVSPPGRGG

SEQ ID NO: 452 - protein, 25 aa, Artificial Sequence
  Description of Artificial Sequence: Synthetic peptide
GAPVDQLHEDFYDWFVRQVSQAATG

SEQ ID NO: 453 - protein, 26 aa, Artificial Sequence
  Description of Artificial Sequence: Synthetic peptide
RSASGSLPEQFYDWFVRQVSLSGTDK

SEQ ID NO: 454 - protein, 26 aa, Artificial Sequence
  Description of Artificial Sequence: Synthetic peptide
SRVTTVFHENFYDWFVRQLSDSAISG

SEQ ID NO: 455 - protein, 26 aa, Artificial Sequence
  Description of Artificial Sequence: Synthetic peptide
DERGGKFREDFYDWFVRQVSESRFGQ

SEQ ID NO: 456 - protein, 26 aa, Artificial Sequence
  Description of Artificial Sequence: Synthetic peptide
RGAVAGFHDQFYDWFDRQVSRVHKFG

SEQ ID NO: 457 - protein, 26 aa, Artificial Sequence
  Description of Artificial Sequence: Synthetic peptide
AICDAGFHEHFYDWFALQVSDCGRQS

SEQ ID NO: 458 - protein, 26 aa, Artificial Sequence
  Description of Artificial Sequence: Synthetic peptide
LGYQEPFQQNFYDWFVRQVSGAENAG

SEQ ID NO: 459 - protein, 26 aa, Artificial Sequence
  Description of Artificial Sequence: Synthetic peptide
WRGHGTFHEDFYDWFVRQVSGSGSST

SEQ ID NO: 460 - protein, 26 aa, Artificial Sequence
  Description of Artificial Sequence: Synthetic peptide
GGRVGVLHENFYDWFDRQVSLRGADG

SEQ ID NO: 461 - protein, 26 aa, Artificial Sequence
  Description of Artificial Sequence: Synthetic peptide
CNLTAGFHEQFYHWFAIQVCGDAENA

SEQ ID NO: 462 - protein, 26 aa, Artificial Sequence
  Description of Artificial Sequence: Synthetic peptide
ERGEDMFHENFYDWFVRQISGRQGGG

SEQ ID NO: 463 - protein, 26 aa, Artificial Sequence
  Description of Artificial Sequence: Synthetic peptide
TNQGVGFYDSFYGWFVRQIQYGVDSG

SEQ ID NO: 464 - protein, 26 aa, Artificial Sequence
  Description of Artificial Sequence: Synthetic peptide
HLADGQFHEKFYDWFERQISSRCNDC

SEQ ID NO: 465 - protein, 26 aa, Artificial Sequence
  Description of Artificial Sequence: Synthetic peptide
QTFGKSLHENFYDWFVRQVSREEGGD

SEQ ID NO: 466 - protein, 26 aa, Artificial Sequence
  Description of Artificial Sequence: Synthetic peptide
FRTLAAQHDSFYDWFDRQVSGAAGER

SEQ ID NO: 467 - protein, 26 aa, Artificial Sequence
  Description of Artificial Sequence: Synthetic peptide
SASTHQFHENFYDWFVRQVSGAQKIL

SEQ ID NO: 468 - protein, 21 aa, Artificial Sequence
  Description of Artificial Sequence: Synthetic peptide
  MOD_RES (1)..(6): Variable amino acid
  MOD_RES (9)..(10): Variable amino acid
  MOD_RES (13): Variable amino acid
  MOD_RES (16)..(21): Variable amino acid
XXXXXXFHXXFYXWFXXXXXX

SEQ ID NO: 469 - protein, 21 aa, Artificial Sequence
  Description of Artificial Sequence: Synthetic peptide
VTFTSAVFHENFYDWFVRQVS

SEQ ID NO: 470 - protein, 20 aa, Artificial Sequence
  Description of Artificial Sequence: Synthetic peptide
  MOD_RES (19): Unknown amino acid; translation read-through at TGA stop codon
QSDSGTVHDRFYGWFRDTXA

SEQ ID NO: 471 - protein, 21 aa, Artificial Sequence
  Description of Artificial Sequence: Synthetic peptide
WTDVDGFHSGFYRWFQNQWER

SEQ ID NO: 472 - protein, 21 aa, Artificial Sequence
  Description of Artificial Sequence: Synthetic peptide
VASGHVLHGQFYRWFVDQFAL

SEQ ID NO: 473 - protein, 21 aa, Artificial Sequence
  Description of Artificial Sequence: Synthetic peptide
QARVGNVHQQFYEWFREVMQG

SEQ ID NO: 474 - protein, 21 aa, Artificial Sequence
  Description of Artificial Sequence: Synthetic peptide
VGDFCVSHDCFYGWFLRESMQ

SEQ ID NO: 475 - protein, 20 aa, Artificial Sequence
  Description of Artificial Sequence: Synthetic peptide
SGSRPVFHEQFYEWFVDQLG

SEQ ID NO: 476 - protein, 21 aa, Artificial Sequence
  Description of Artificial Sequence: Synthetic peptide
QFSAGAFHGDFYGWFRALYNG

SEQ ID NO: 477 - protein, 21 aa, Artificial Sequence
  Description of Artificial Sequence: Synthetic peptide
SRFDERLHHQFYEWFRVLNEP

SEQ ID NO: 478 - protein, 21 aa, Artificial Sequence
  Description of Artificial Sequence: Synthetic peptide
DSVNSDLHRAFYGWFAEQWRA

SEQ ID NO: 479 - protein, 21 aa, Artificial Sequence
  Description of Artificial Sequence: Synthetic peptide
GSVDREIHGPFYSWFSEQLWG

SEQ ID NO: 480 - protein, 21 aa, Artificial Sequence
  Description of Artificial Sequence: Synthetic peptide
SAKTPVLHDGFYMWFEAQSES

SEQ ID NO: 481 - protein, 21 aa, Artificial Sequence
  Description of Artificial Sequence: Synthetic peptide
LVVGRRFHQSFYDWFVAAAGG

SEQ ID NO: 482 - protein, 21 aa, Artificial Sequence
  Description of Artificial Sequence: Synthetic peptide
IMWPCTFQDPFYCWFQTEQGR

SEQ ID NO: 483 - protein, 21 aa, Artificial Sequence
  Description of Artificial Sequence: Synthetic peptide
VVGPLDIHERFYGWFHQQGGA

SEQ ID NO: 484 - protein, 21 aa, Artificial Sequence
  Description of Artificial Sequence: Synthetic peptide
VVPKAGFHEAFYEWFRRQDRD

SEQ ID NO: 485 - protein, 21 aa, Artificial Sequence
  Description of Artificial Sequence: Synthetic peptide
QSFVTSVHTRFYAWFASALEM

SEQ ID NO: 486 - protein, 21 aa, Artificial Sequence
  Description of Artificial Sequence: Synthetic peptide
SRGLGLYHSGFYGWFERQFNQ

SEQ ID NO: 487 - protein, 21 aa, Artificial Sequence
  Description of Artificial Sequence: Synthetic peptide
GADTGAVHRRFYLWFEQLSGG

SEQ ID NO: 488 - protein, 21 aa, Artificial Sequence
  Description of Artificial Sequence: Synthetic peptide
PGNRPTFHAEFYRWFREAQGS

SEQ ID NO: 489 - protein, 21 aa, Artificial Sequence
  Description of Artificial Sequence: Synthetic peptide
VAVAWGLHESFYAWFENQFSD

SEQ ID NO: 490 - protein, 21 aa, Artificial Sequence
  Description of Artificial Sequence: Synthetic peptide
GFNTGTFHDQFYYWFWEAAGG

SEQ ID NO: 491 - protein, 21 aa, Artificial Sequence
  Description of Artificial Sequence: Synthetic peptide
GDGLTAFHQGFYEWFDIQMYG

SEQ ID NO: 492 - protein, 21 aa, Artificial Sequence
  Description of Artificial Sequence: Synthetic peptide
VGVNRQFHTRFYAWFDEQLGG

SEQ ID NO: 493 - protein, 21 aa, Artificial Sequence
  Description of Artificial Sequence: Synthetic peptide
GPRGQRLHDAFYSWFDALRVN

SEQ ID NO: 494 - protein, 21 aa, Artificial Sequence
  Description of Artificial Sequence: Synthetic peptide
LGTLAVFHELFYGWFERQLGG

SEQ ID NO: 495 - protein, 21 aa, Artificial Sequence
  Description of Artificial Sequence: Synthetic peptide
LGGYCGFNCQFYRWFDNLADR

SEQ ID NO: 496 - protein, 21 aa, Artificial Sequence
  Description of Artificial Sequence: Synthetic peptide
FSGWADYQSGFYQWFAEELAN

SEQ ID NO: 497 - protein, 21 aa, Artificial Sequence
  Description of Artificial Sequence: Synthetic peptide
WGPFSVFDESFYRWFAQASDD

SEQ ID NO: 498 - protein, 21 aa, Artificial Sequence
  Description of Artificial Sequence: Synthetic peptide
PRNEGLVHGLFYDWFQRALSG

SEQ ID NO: 499 - protein, 21 aa, Artificial Sequence
  Description of Artificial Sequence: Synthetic peptide
DEGGAPLDVMFYRWFEQAVRG

SEQ ID NO: 500 - protein, 21 aa, Artificial Sequence
  Description of Artificial Sequence: Synthetic peptide
QSGNRGSHGAFYSWFRDVLAN

SEQ ID NO: 501 - protein, 21 aa, Artificial Sequence
  Description of Artificial Sequence: Synthetic peptide
MRQRDGFNSSFYGWFAAALGE

SEQ ID NO: 502 - protein, 21 aa, Artificial Sequence
  Description of Artificial Sequence: Synthetic peptide
SEERKKVHSQFYSWFDRQLLG

SEQ ID NO: 503 - protein, 21 aa, Artificial Sequence
  Description of Artificial Sequence: Synthetic peptide
PSPNAPFHGGFYDWFDWVQGS

SEQ ID NO: 504 - protein, 21 aa, Artificial Sequence
  Description of Artificial Sequence: Synthetic peptide
FHRPGSFNTNFYQWFDDQMNQ

SEQ ID NO: 505 - protein, 21 aa, Artificial Sequence
  Description of Artificial Sequence: Synthetic peptide
SDDSSTLNGRFYTWFHMQLLD

SEQ ID NO: 506 - protein, 21 aa, Artificial Sequence
  Description of Artificial Sequence: Synthetic peptide
QRGGGGFHEGFYSWFRSQSLL

SEQ ID NO: 507 - protein, 21 aa, Artificial Sequence
  Description of Artificial Sequence: Synthetic peptide
SGSRPVFHEQFYEWFVDQLGL

SEQ ID NO: 508 - protein, 21 aa, Artificial Sequence
  Description of Artificial Sequence: Synthetic peptide
GGSSQAFHGAFYEWFSAQLRG

SEQ ID NO: 509 - protein, 21 aa, Artificial Sequence
  Description of Artificial Sequence: Synthetic peptide
AFVSERVNQRFYDWFRDQMRS

SEQ ID NO: 510 - protein, 21 aa, Artificial Sequence
  Description of Artificial Sequence: Synthetic peptide
VRHPTRFHDEFYRWFTEQLTT

SEQ ID NO: 511 - protein, 21 aa, Artificial Sequence
  Description of Artificial Sequence: Synthetic peptide
ARLLNIFDRGFYNWFQRQLDE

SEQ ID NO: 512 - protein, 21 aa, Artificial Sequence
  Description of Artificial Sequence: Synthetic peptide
PSLSSNLHESFYRWFDQLVST

SEQ ID NO: 513 - protein, 21 aa, Artificial Sequence
  Description of Artificial Sequence: Synthetic peptide
FAFGLGFHQGFYDWFAHQLEG

SEQ ID NO: 514 - protein, 21 aa, Artificial Sequence
  Description of Artificial Sequence: Synthetic peptide
VSATVMLHREFYDWFGLQLLD

SEQ ID NO: 515 - protein, 21 aa, Artificial Sequence
  Description of Artificial Sequence: Synthetic peptide
GGVSGVLHDRFYSWFERQLAG

SEQ ID NO: 516 - protein, 21 aa, Artificial Sequence
  Description of Artificial Sequence: Synthetic peptide
GLGIASFHEGFYSWFTAQLGA

SEQ ID NO: 517 - protein, 21 aa, Artificial Sequence
  Description of Artificial Sequence: Synthetic peptide
RVDAAALNAGFYEWFRGVIQG

SEQ ID NO: 518 - protein, 21 aa, Artificial Sequence
  Description of Artificial Sequence: Synthetic peptide
GGAGRSFHDAFYEWFERQMAG

SEQ ID NO: 519 - protein, 21 aa, Artificial Sequence
  Description of Artificial Sequence: Synthetic peptide
EGARQGFHARFYSWFAQQLAL

SEQ ID NO: 520 - protein, 21 aa, Artificial Sequence
  Description of Artificial Sequence: Synthetic peptide
VLLPGVVHGGFYDWFSRQLSS

SEQ ID NO: 521 - protein, 21 aa, Artificial Sequence
  Description of Artificial Sequence: Synthetic peptide
GALSDRYNNVFYDWFREQLLG

SEQ ID NO: 522 - protein, 21 aa, Artificial Sequence
  Description of Artificial Sequence: Synthetic peptide
PDSFMSLHQRFYSWFQAQVGT

SEQ ID NO: 523 - protein, 21 aa, Artificial Sequence
  Description of Artificial Sequence: Synthetic peptide
RVYKANFHNEFYGWFREQLLG

SEQ ID NO: 524 - protein, 21 aa, Artificial Sequence
  Description of Artificial Sequence: Synthetic peptide
HSGMRDVHARFYSWFSEQLSG

SEQ ID NO: 525 - protein, 21 aa, Artificial Sequence
  Description of Artificial Sequence: Synthetic peptide
ARLLERFQDPFYEWFETLMGD

SEQ ID NO: 526 - protein, 21 aa, Artificial Sequence
  Description of Artificial Sequence: Synthetic peptide
RNSSGNFHDKFYNWFEAQLKG

SEQ ID NO: 527 - protein, 21 aa, Artificial Sequence
  Description of Artificial Sequence: Synthetic peptide
GSMSPVFNDQFYGWFRDLVDE

SEQ ID NO: 528 - protein, 21 aa, Artificial Sequence
  Description of Artificial Sequence: Synthetic peptide
SCTGRQFDGCFYAWFEDQLVG

SEQ ID NO: 529 - protein, 21 aa, Artificial Sequence
  Description of Artificial Sequence: Synthetic peptide
GIAVQSLHDSFYRWFDNALGS

SEQ ID NO: 530 - protein, 21 aa, Artificial Sequence
  Description of Artificial Sequence: Synthetic peptide
IGPPGSLHRGFYDWFAEQVEA

SEQ ID NO: 531 - protein, 21 aa, Artificial Sequence
  Description of Artificial Sequence: Synthetic peptide
GAAGISFHRGFYDWFAAQVRD

SEQ ID NO: 532 - protein, 21 aa, Artificial Sequence
  Description of Artificial Sequence: Synthetic peptide
GVDVTDFHKDFYSWFQRQLNG

SEQ ID NO: 533 - protein, 21 aa, Artificial Sequence
  Description of Artificial Sequence: Synthetic peptide
WAGRAGIHGGFYEWFNRQLRG

SEQ ID NO: 534 - protein, 21 aa, Artificial Sequence
  Description of Artificial Sequence: Synthetic peptide
LGQLAAFHLGFYEWFSEAVAA

SEQ ID NO: 535 - protein, 21 aa, Artificial Sequence
  Description of Artificial Sequence: Synthetic peptide
VHSVSRLNVGFYQWFQDQLSG

SEQ ID NO: 536 - protein, 21 aa, Artificial Sequence
  Description of Artificial Sequence: Synthetic peptide
LGLMAIFDRGFYGWFEQQLSG

SEQ ID NO: 537 - protein, 21 aa, Artificial Sequence
  Description of Artificial Sequence: Synthetic peptide
VARGSSLHDDFYEWFASQLRT

SEQ ID NO: 538 - protein, 21 aa, Artificial Sequence
  Description of Artificial Sequence: Synthetic peptide
LGYIGALNTQFYSWFADLVGS

SEQ ID NO: 539 - protein, 21 aa, Artificial Sequence
  Description of Artificial Sequence: Synthetic peptide
EDSRLRLHEGFYGWFRKQLGD

SEQ ID NO: 540 - protein, 21 aa, Artificial Sequence
  Description of Artificial Sequence: Synthetic peptide
GRDNMKFHSGFYDWFTQQLAG

SEQ ID NO: 541 - protein, 21 aa, Artificial Sequence
  Description of Artificial Sequence: Synthetic peptide
AGVMGGFHQEFYLWFERALSN

SEQ ID NO: 542 - protein, 21 aa, Artificial Sequence
  Description of Artificial Sequence: Synthetic peptide
AGHVGQVYDGFYGWFREQLGA

SEQ ID NO: 543 - protein, 21 aa, Artificial Sequence
  Description of Artificial Sequence: Synthetic peptide
FVQNIGFDYDFYGWFVREVEK

SEQ ID NO: 544 - protein, 21 aa, Artificial Sequence
  Description of Artificial Sequence: Synthetic peptide
PVGIGGLHRAFYQWFQSQVDA

SEQ ID NO: 545 - protein, 21 aa, Artificial Sequence
  Description of Artificial Sequence: Synthetic peptide
GSRQEADHQAFYDWFNLVLGV

SEQ ID NO: 546 - protein, 21 aa, Artificial Sequence
  Description of Artificial Sequence: Synthetic peptide
AGGRKPFHDDFYGWFRDQLAE

SEQ ID NO: 547 - protein, 21 aa, Artificial Sequence
  Description of Artificial Sequence: Synthetic peptide
DLASHGFHDAFYNWFSVQLNS

SEQ ID NO: 548 - protein, 21 aa, Artificial Sequence
  Description of Artificial Sequence: Synthetic peptide
GSNGGGVHGQFYAWFVEALSG

SEQ ID NO: 549 - protein, 21 aa, Artificial Sequence
  Description of Artificial Sequence: Synthetic peptide
RGRASTFHDGFYGWFSQQLRF

SEQ ID NO: 550 - protein, 21 aa, Artificial Sequence
  Description of Artificial Sequence: Synthetic peptide
SPARRVSHHDFYGWFAKQLES

SEQ ID NO: 551 - protein, 21 aa, Artificial Sequence
  Description of Artificial Sequence: Synthetic peptide
SSDVGAFHSAFYDWFKAQLSG

SEQ ID NO: 552 - protein, 21 aa, Artificial Sequence
  Description of Artificial Sequence: Synthetic peptide
PTVHRAFDDLFYGWFAKQVED

SEQ ID NO: 553 - protein, 21 aa, Artificial Sequence
  Description of Artificial Sequence: Synthetic peptide
SSNTVGLDERFYAWFVDQLGA

SEQ ID NO: 554 - protein, 21 aa, Artificial Sequence
  Description of Artificial Sequence: Synthetic peptide
PGAAEGFHSAFYDWFAQAVSG

SEQ ID NO: 555 - protein, 21 aa, Artificial Sequence
  Description of Artificial Sequence: Synthetic peptide
MRSEASFHVEFYSWFEEQLRS

SEQ ID NO: 556 - protein, 21 aa, Artificial Sequence
  Description of Artificial Sequence: Synthetic peptide
VSRYGGQQDGFYHWFSDLLKG

SEQ ID NO: 557 - protein, 21 aa, Artificial Sequence
  Description of Artificial Sequence: Synthetic peptide
RPSSGGLHYGFYHWFRVQEEM

SEQ ID NO: 558 - protein, 21 aa, Artificial Sequence
  Description of Artificial Sequence: Synthetic peptide
SNIEEHFHMQFYRWFSDALGN

SEQ ID NO: 559 - protein, 21 aa, Artificial Sequence
  Description of Artificial Sequence: Synthetic peptide
ANDCLGLHAGFYGWFACQLGG

SEQ ID NO: 560 - protein, 21 aa, Artificial Sequence
  Description of Artificial Sequence: Synthetic peptide
TGHRLGLDEQFYWWFRDALSG

SEQ ID NO: 561 - protein, 21 aa, Artificial Sequence
  Description of Artificial Sequence: Synthetic peptide
VLTSNTLHQRFYSWFAAARRE

SEQ ID NO: 562 - protein, 21 aa, Artificial Sequence
  Description of Artificial Sequence: Synthetic peptide
CVAQGGFQSSFYCWFAGLDID

SEQ ID NO: 563 - protein, 21 aa, Artificial Sequence
  Description of Artificial Sequence: Synthetic peptide
NGQSSRFHTAFYDWFAAQLSG

SEQ ID NO: 564 - protein, 21 aa, Artificial Sequence
  Description of Artificial Sequence: Synthetic peptide
SVPRGTVHDAFYQWFREVALG

SEQ ID NO: 565 - protein, 21 aa, Artificial Sequence
  Description of Artificial Sequence: Synthetic peptide
GARGSTFHDQFYEWFWVQLGD

SEQ ID NO: 566 - protein, 21 aa, Artificial Sequence
  Description of Artificial Sequence: Synthetic peptide
PPGMNGFHTSFYSWFVDQLGD

SEQ ID NO: 567 - protein, 21 aa, Artificial Sequence
  Description of Artificial Sequence: Synthetic peptide
AVGTLGYHSGFYRWFERQLGG

SEQ ID NO: 568 - protein, 21 aa, Artificial Sequence
  Description of Artificial Sequence: Synthetic peptide
ELQARGVHRNFYRWFEAQVSG

SEQ ID NO: 569 - protein, 21 aa, Artificial Sequence
  Description of Artificial Sequence: Synthetic peptide
HRVARAFHEQFYDWFEKAVSG

SEQ ID NO: 570 - protein, 21 aa, Artificial Sequence
  Description of Artificial Sequence: Synthetic peptide
GAMEPDYHRSFYQWFAAALGE

SEQ ID NO: 571 - protein, 21 aa, Artificial Sequence
  Description of Artificial Sequence: Synthetic peptide
CPDRQSVDDRFYNWFADALAS

SEQ ID NO: 572 - protein, 21 aa, Artificial Sequence
  Description of Artificial Sequence: Synthetic peptide
GGAQISFHERFYQWFLQEAAG

SEQ ID NO: 573 - protein, 21 aa, Artificial Sequence
  Description of Artificial Sequence: Synthetic peptide
HKRGIVQHGAFYAWFDSLLSG

SEQ ID NO: 574 - protein, 21 aa, Artificial Sequence
  Description of Artificial Sequence: Synthetic peptide
QASDNRSDGQFYLWFEKLLSS

SEQ ID NO: 575 - protein, 21 aa, Artificial Sequence
  Description of Artificial Sequence: Synthetic peptide
DRGRMGVDEGFYNWFARQMQE

SEQ ID NO: 576 - protein, 21 aa, Artificial Sequence
  Description of Artificial Sequence: Synthetic peptide
VTFTSAVFHENFYDWFVRQVS

SEQ ID NO: 577 - protein, 21 aa, Artificial Sequence
  Description of Artificial Sequence: Synthetic peptide
TASQECFDDGFYGWFRAWRCT

SEQ ID NO: 578 - protein, 21 aa, Artificial Sequence
  Description of Artificial Sequence: Synthetic peptide
SLDWRWSEEPFYRWFQRALAG

SEQ ID NO: 579 - protein, 21 aa, Artificial Sequence
  Description of Artificial Sequence: Synthetic peptide
CMSLSDCHRKFYGWFKSQGGE

SEQ ID NO: 580 - protein, 21 aa, Artificial Sequence
  Description of Artificial Sequence: Synthetic peptide
LALCRRSPGSFYGWFQAAVGC

SEQ ID NO: 581 - protein, 21 aa, Artificial Sequence
  Description of Artificial Sequence: Synthetic peptide
PRSATMSDGGFYWWFASQLGL

SEQ ID NO: 582 - protein, 21 aa, Artificial Sequence
  Description of Artificial Sequence: Synthetic peptide
  MOD_RES (14): Unknown amino acid; translation read-through at TGA stop codon
LRRSSVFHDPFYEXISRLVGG

SEQ ID NO: 583 - protein, 21 aa, Artificial Sequence
  Description of Artificial Sequence: Synthetic peptide
ARLQQQFHGGFYEWFRAQVSP

SEQ ID NO: 584 - protein, 21 aa, Artificial Sequence
  Description of Artificial Sequence: Synthetic peptide
AQLDNLCHEPFYSWFCAVTRE

SEQ ID NO: 585 - protein, 21 aa, Artificial Sequence
  Description of Artificial Sequence: Synthetic peptide
WTCDTAFHQDFYQWFCDKLGV

SEQ ID NO: 586 - protein, 21 aa, Artificial Sequence
  Description of Artificial Sequence: Synthetic peptide
GKEGFGLDRDFYWWFREQLGP

SEQ ID NO: 587 - protein, 21 aa, Artificial Sequence
  Description of Artificial Sequence: Synthetic peptide
GRAPSSFDCDFYCWFRNQVQS

SEQ ID NO: 588 - protein, 21 aa, Artificial Sequence
  Description of Artificial Sequence: Synthetic peptide
DVEAETQHRLFYAWFLSQLGS

SEQ ID NO: 589 - protein, 21 aa, Artificial Sequence
  Description of Artificial Sequence: Synthetic peptide
ISVTAVFHDGFYGWFNEQVSK

SEQ ID NO: 590 - protein, 21 aa, Artificial Sequence
  Description of Artificial Sequence: Synthetic peptide
NSEHGRLDVDFYGWFARVIQQ

SEQ ID NO: 591 - protein, 21 aa, Artificial Sequence
  Description of Artificial Sequence: Synthetic peptide
GPLGDGCQDGFYGWFMCQVST

SEQ ID NO: 592 - protein, 21 aa, Artificial Sequence
  Description of Artificial Sequence: Synthetic peptide
KRSAYNFHDPFYDWFRMQLSG

SEQ ID NO: 593 - protein, 21 aa, Artificial Sequence
  Description of Artificial Sequence: Synthetic peptide
ASEPGGYLDPFYGWFREQLRA

SEQ ID NO: 594 - protein, 21 aa, Artificial Sequence
  Description of Artificial Sequence: Synthetic peptide
NRGDGGVHSGFYNWFRLQLSG

SEQ ID NO: 595 - protein, 21 aa, Artificial Sequence
  Description of Artificial Sequence: Synthetic peptide
ASKGSSLHNDFYGWFAQQLAR

SEQ ID NO: 596 - protein, 21 aa, Artificial Sequence
  Description of Artificial Sequence: Synthetic peptide
ANVSMWIQVGFYDWFDAQLRQ

SEQ ID NO: 597 - protein, 21 aa, Artificial Sequence
  Description of Artificial Sequence: Synthetic peptide
RTSPGSLHDPFYDWFQQQLGG

SEQ ID NO: 598 - protein, 21 aa, Artificial Sequence
  Description of Artificial Sequence: Synthetic peptide
PGVMSSFHGGFYSWFREQLNG

SEQ ID NO: 599 - protein, 21 aa, Artificial Sequence
  Description of Artificial Sequence: Synthetic peptide
CLANSEDHDSFYGWFCQALGG

SEQ ID NO: 600 - protein, 21 aa, Artificial Sequence
  Description of Artificial Sequence: Synthetic peptide
GGSMGGMHGSFYEWFALQLRS

SEQ ID NO: 601 - protein, 21 aa, Artificial Sequence
  Description of Artificial Sequence: Synthetic peptide
RPQGGSIHAGFYQWFRDAVAG

SEQ ID NO: 602 - protein, 21 aa, Artificial Sequence
  Description of Artificial Sequence: Synthetic peptide
GALSSLFDAAFYDWFNRQLEG

SEQ ID NO: 603 - protein, 21 aa, Artificial Sequence
  Description of Artificial Sequence: Synthetic peptide
KVDLRGFHDGFYGWFARQLAG

SEQ ID NO: 604 - protein, 21 aa, Artificial Sequence
  Description of Artificial Sequence: Synthetic peptide
CSGLQRCHDSFYSWFESVVRE

SEQ ID NO: 605 - protein, 21 aa, Artificial Sequence
  Description of Artificial Sequence: Synthetic peptide
DSLGISFHEGFYDWFRRQLDM

SEQ ID NO: 606 - protein, 18 aa, Artificial Sequence
  Description of Artificial Sequence: Synthetic peptide
SGVFNGTFYDWFRIQLGE

SEQ ID NO: 607 - protein, 21 aa, Artificial Sequence
  Description of Artificial Sequence: Synthetic peptide
GYREMRSDLGFYQWFRDQLGL

SEQ ID NO: 608 - protein, 21 aa, Artificial Sequence
  Description of Artificial Sequence: Synthetic peptide
SVFMQHDHVGFYAWFRSLMEE

SEQ ID NO: 609 - protein, 21 aa, Artificial Sequence
  Description of Artificial Sequence: Synthetic peptide
FRHITEVDRSFYGWFVEQLRG

SEQ ID NO: 610 - protein, 21 aa, Artificial Sequence
  Description of Artificial Sequence: Synthetic peptide
WAGGSDVDGSFYDWFQRLLAS

SEQ ID NO: 611 - protein, 21 aa, Artificial Sequence
  Description of Artificial Sequence: Synthetic peptide
GLQNVSFHSGFYEWFARQVSQ

SEQ ID NO: 612 - protein, 21 aa, Artificial Sequence
  Description of Artificial Sequence: Synthetic peptide
SRVSDPYHVGFYQWFEEVVRG

SEQ ID NO: 613 - protein, 21 aa, Artificial Sequence
  Description of Artificial Sequence: Synthetic peptide
MGGATFFHTGFYDWFAAQLQH

SEQ ID NO: 614 - protein, 21 aa, Artificial Sequence
  Description of Artificial Sequence: Synthetic peptide
RPASRPFHSGFYQWFADQLSH

SEQ ID NO: 615 - protein, 21 aa, Artificial Sequence
  Description of Artificial Sequence: Synthetic peptide
GLAPGNFHEDFYRWFQEQTLG

SEQ ID NO: 616 - protein, 21 aa, Artificial Sequence
  Description of Artificial Sequence: Synthetic peptide
TAAISDFNSLFYGWFEQLLSS

SEQ ID NO: 617 - protein, 21 aa, Artificial Sequence
  Description of Artificial Sequence: Synthetic peptide
LDEDLPQHAGFYGWFAEALGV

SEQ ID NO: 618 - protein, 21 aa, Artificial Sequence
  Description of Artificial Sequence: Synthetic peptide
ASHKSAFDDNFYRWFSMQLRD

SEQ ID NO: 619 - protein, 21 aa, Artificial Sequence
  Description of Artificial Sequence: Synthetic peptide
HTGAGDLHGAFYNWFLEQLGG

SEQ ID NO: 620 - protein, 21 aa, Artificial Sequence
  Description of Artificial Sequence: Synthetic peptide
RRGRDGFHGGFYDWFAAQLSD

SEQ ID NO: 621 - protein, 21 aa, Artificial Sequence
  Description of Artificial Sequence: Synthetic peptide
GNFREAFHADFYSWFERQLQS

SEQ ID NO: 622 - protein, 21 aa, Artificial Sequence
  Description of Artificial Sequence: Synthetic peptide
RDTLPAFHQHFYQWFEKQVSA

SEQ ID NO: 623 - protein, 21 aa, Artificial Sequence
  Description of Artificial Sequence: Synthetic peptide
ERETAAFGQAFYQWFRDQIAG

SEQ ID NO: 624 - protein, 21 aa, Artificial Sequence
  Description of Artificial Sequence: Synthetic peptide
WGEGGGFYDWFYDQLGWEPSH

SEQ ID NO: 625 - protein, 21 aa, Artificial Sequence
  Description of Artificial Sequence: Synthetic peptide
SLVAADLHEGFYGWFRSQLGG

SEQ ID NO: 626 - protein, 21 aa, Artificial Sequence
  Description of Artificial Sequence: Synthetic peptide
TSEVGDFHAEFYSWFEIQLGR

SEQ ID NO: 627 - protein, 21 aa, Artificial Sequence
  Description of Artificial Sequence: Synthetic peptide
TGADGLLHARFYAWFEEQLRE

SEQ ID NO: 628 - protein, 21 aa, Artificial Sequence
  Description of Artificial Sequence: Synthetic peptide
RRSDSSLHRSFYDWFSVQLLN

SEQ ID NO: 629 - protein, 21 aa, Artificial Sequence
  Description of Artificial Sequence: Synthetic peptide
SESKYLLHSGFYGWFEAQLRG

SEQ ID NO: 630 - protein, 21 aa, Artificial Sequence
  Description of Artificial Sequence: Synthetic peptide
HGVIRADHTGFYGWFSKQLSD

SEQ ID NO: 631 - protein, 21 aa, Artificial Sequence
  Description of Artificial Sequence: Synthetic peptide
  MOD_RES (5): Unknown amino acid
LINAXVFRRGFYAWFEEQVSK

SEQ ID NO: 632 - protein, 21 aa, Artificial Sequence
  Description of Artificial Sequence: Synthetic peptide
LQRYIGFHDPFYDWFSRALSG

SEQ ID NO: 633 - protein, 21 aa, Artificial Sequence
  Description of Artificial Sequence: Synthetic peptide
MRTAELFHVGFYDWFDAQLMD

SEQ ID NO: 634 - protein, 21 aa, Artificial Sequence
  Description of Artificial Sequence: Synthetic peptide
WAPPDALHGQFYRWFQRQLDQ

SEQ ID NO: 635 - protein, 21 aa, Artificial Sequence
  Description of Artificial Sequence: Synthetic peptide
AVHAATFHDDFYRWFEQVVGS

SEQ ID NO: 636 - protein, 21 aa, Artificial Sequence
  Description of Artificial Sequence: Synthetic peptide
FDAVHGFDGGFYGWFKRELQR

SEQ ID NO: 637 - protein, 21 aa, Artificial Sequence
  Description of Artificial Sequence: Synthetic peptide
QAGGMEFHGAFYNWFLQQLSG

SEQ ID NO: 638 - protein, 21 aa, Artificial Sequence
  Description of Artificial Sequence: Synthetic peptide
GRSVSRMNAEFYQWFGHQLAA

SEQ ID NO: 639 - protein, 21 aa, Artificial Sequence
  Description of Artificial Sequence: Synthetic peptide
AAVNSLFHDEFYLWFQDQLDG

SEQ ID NO: 640 - protein, 21 aa, Artificial Sequence
  Description of Artificial Sequence: Synthetic peptide
QLGMDWFHADFYEWFLAQLPS

SEQ ID NO: 641 - protein, 21 aa, Artificial Sequence
  Description of Artificial Sequence: Synthetic peptide
RLAGSGIHEGFYGWFVDQLLA

SEQ ID NO: 642 - protein, 21 aa, Artificial Sequence
  Description of Artificial Sequence: Synthetic peptide
GREIGGVHDGFYDWFRQQSEQ

SEQ ID NO: 643 - protein, 21 aa, Artificial Sequence
  Description of Artificial Sequence: Synthetic peptide
VRSEQRFDSSFYQWFNDLLMS

SEQ ID NO: 644 - protein, 21 aa, Artificial Sequence
  Description of Artificial Sequence: Synthetic peptide
QSPYGFFHDGFYRWFLQQTGM

SEQ ID NO: 645 - protein, 21 aa, Artificial Sequence
  Description of Artificial Sequence: Synthetic peptide
FQCGAAFHVDFYRWFTCQEQF

SEQ ID NO: 646 - protein, 21 aa, Artificial Sequence
  Description of Artificial Sequence: Synthetic peptide
GAFGSEFHEQFYRWFEDALSF

SEQ ID NO: 647 - protein, 21 aa, Artificial Sequence
  Description of Artificial Sequence: Synthetic peptide
EHTSYQIHRQFYEWFDRALGR

SEQ ID NO: 648 - protein, 21 aa, Artificial Sequence
  Description of Artificial Sequence: Synthetic peptide
SGTAADLHSRFYGWFALQARE

SEQ ID NO: 649 - protein, 21 aa, Artificial Sequence
  Description of Artificial Sequence: Synthetic peptide
EGFGVLFHGQFYRWFQLQLDG

SEQ ID NO: 650 - protein, 21 aa, Artificial Sequence
  Description of Artificial Sequence: Synthetic peptide
QQSAGHPHSSFYLWFSELLGA

SEQ ID NO: 651 - protein, 21 aa, Artificial Sequence
  Description of Artificial Sequence: Synthetic peptide
YLQRAGFHRSFYGWFDQALRD

SEQ ID NO: 652 - protein, 21 aa, Artificial Sequence
  Description of Artificial Sequence: Synthetic peptide
MWLWATLHSDFYSWFEQVVSG

SEQ ID NO: 653 - protein, 21 aa, Artificial Sequence
  Description of Artificial Sequence: Synthetic peptide
GANALGFKDRFYEWFAAQLWD

SEQ ID NO: 654 - protein, 21 aa, Artificial Sequence
  Description of Artificial Sequence: Synthetic peptide
GSGLYVFHWGFYDWFEQQMGG

SEQ ID NO: 655 - protein, 21 aa, Artificial Sequence
  Description of Artificial Sequence: Synthetic peptide
LDKGWGFDLQFYRWFEAATRA

SEQ ID NO: 656 - protein, 21 aa, Artificial Sequence
  Description of Artificial Sequence: Synthetic peptide
QRSAVEFHADFYDWFLRLLTP

SEQ ID NO: 657 - protein, 21 aa, Artificial Sequence
  Description of Artificial Sequence: Synthetic peptide
DQRMGSFHGEFYRWFEETLLS

SEQ ID NO: 658 - protein, 21 aa, Artificial Sequence
  Description of Artificial Sequence: Synthetic peptide
GRFYGWFQDAIDQLMPWGFDP

SEQ ID NO: 659 - protein, 21 aa, Artificial Sequence
  Description of Artificial Sequence: Synthetic peptide
IQGWEPFYGWFDDVVAQMFEE

SEQ ID NO: 660 - protein, 17 aa, Artificial Sequence
  Description of Artificial Sequence: Synthetic peptide
RYGRWGLAQQFYDWFDR

SEQ ID NO: 661 - protein, 17 aa, Artificial Sequence
  Description of Artificial Sequence: Synthetic peptide
RGRLGSLSTQFYNWFAE

SEQ ID NO: 662 - protein, 21 aa, Artificial Sequence
  Description of Artificial Sequence: Synthetic peptide
ASAYTPFYQWFADVVSEYMQQ

SEQ ID NO: 663 - protein, 21 aa, Artificial Sequence
  Description of Artificial Sequence: Synthetic peptide
PYRMEGTEKWNFYDWFVAQLQ

SEQ ID NO: 664 - protein, 21 aa, Artificial Sequence
  Description of Artificial Sequence: Synthetic peptide
SAVHFQFYKWFDNLLPVPLSA

SEQ ID NO: 665 - protein, 21 aa, Artificial Sequence
  Description of Artificial Sequence: Synthetic peptide
VPVNKSFYRWFQLVLGGSDDW

SEQ ID NO: 666 - protein, 21 aa, Artificial Sequence
  Description of Artificial Sequence: Synthetic peptide
QSPRASFYGWFDDVLRAAGVV

SEQ ID NO: 667 - protein, 21 aa, Artificial Sequence
  Description of Artificial Sequence: Synthetic peptide
TGFYEWFYEQLHSRMLPNPLD

SEQ ID NO: 668 - protein, 21 aa, Artificial Sequence
  Description of Artificial Sequence: Synthetic peptide
RRGVGGFYGWFSQQLQGMGVA

SEQ ID NO: 669 - protein, 21 aa, Artificial Sequence
  Description of Artificial Sequence: Synthetic peptide
SSQDRRFYRWFEQAIVGGRDG

SEQ ID NO: 670 - protein, 21 aa, Artificial Sequence
  Description of Artificial Sequence: Synthetic peptide
TRGQLGFYNWFQQALSTSGMG

SEQ ID NO: 671 - protein, 21 aa, Artificial Sequence
  Description of Artificial Sequence: Synthetic peptide
CADLNAFYQWFCGVLDRGSDH

SEQ ID NO: 672 - protein, 21 aa, Artificial Sequence
  Description of Artificial Sequence: Synthetic peptide
TLIQDQFYWWFSDLLSAEPGD

SEQ ID NO: 673 - protein, 21 aa, Artificial Sequence
  Description of Artificial Sequence: Synthetic peptide
IDQLDAFYRWFDGVMLGMGDP

SEQ ID NO: 674 - protein, 20 aa, Artificial Sequence
  Description of Artificial Sequence: Synthetic peptide
RGGGTFYEWFESALRKHGAG

SEQ ID NO: 675 - protein, 21 aa, Artificial Sequence
  Description of Artificial Sequence: Synthetic peptide
RGLDQDFYRWFQNLVGVEYDR

SEQ ID NO: 676 - protein, 21 aa, Artificial Sequence
  Description of Artificial Sequence: Synthetic peptide
MQGHRGFYGWFARVLEQDRGW

SEQ ID NO: 677 - protein, 21 aa, Artificial Sequence
  Description of Artificial Sequence: Synthetic peptide
ERLHLRFYEWFDTVIGQDGSD

SEQ ID NO: 678 - protein, 21 aa, Artificial Sequence
  Description of Artificial Sequence: Synthetic peptide
MHVQSDFYHWFQSLLGQGGPD

SEQ ID NO: 679 - protein, 21 aa, Artificial Sequence
  Description of Artificial Sequence: Synthetic peptide
TMGTQGFYRWFQNVVKEHLSG

SEQ ID NO: 680 - protein, 21 aa, Artificial Sequence
  Description of Artificial Sequence: Synthetic peptide
ITHNRGFYSWFLDVVQGGAGA

SEQ ID NO: 681 - protein, 21 aa, Artificial Sequence
  Description of Artificial Sequence: Synthetic peptide
VRRDAGFYQWFADILTQLDFE

SEQ ID NO: 682 - protein, 21 aa, Artificial Sequence
  Description of Artificial Sequence: Synthetic peptide
MQLQDEFYNWFRGIMLNDGQD

SEQ ID NO: 683 - protein, 21 aa, Artificial Sequence
  Description of Artificial Sequence: Synthetic peptide
GIRSSGFYQWFDRVLAGVGDG

SEQ ID NO: 684 - protein, 21 aa, Artificial Sequence
  Description of Artificial Sequence: Synthetic peptide
ANLNSQFYSWFASVTGEASPS

SEQ ID NO: 685 - protein, 21 aa, Artificial Sequence
  Description of Artificial Sequence: Synthetic peptide
QSPRASFYGWFDDVLRAAGVV

SEQ ID NO: 686 - protein, 21 aa, Artificial Sequence
  Description of Artificial Sequence: Synthetic peptide
MQRNQGFYSWFDDLVSSTVGV

SEQ ID NO: 687 - protein, 21 aa, Artificial Sequence
  Description of Artificial Sequence: Synthetic peptide
ASGFDPFYAWFLEQLRVANGS

SEQ ID NO: 688 - protein, 21 aa, Artificial Sequence
  Description of Artificial Sequence: Synthetic peptide
SGTPYGFYRWFQSALASATSG

SEQ ID NO: 689 - protein, 21 aa, Artificial Sequence
  Description of Artificial Sequence: Synthetic peptide
QGVEGGFYEWFDRAMGDVRPW

SEQ ID NO: 690 - protein, 21 aa, Artificial Sequence
  Description of Artificial Sequence: Synthetic peptide
DNMSGGFYRWFAQVVADSGGD

SEQ ID NO: 691 - protein, 21 aa, Artificial Sequence
  Description of Artificial Sequence: Synthetic peptide
RGTDDTFYGWFDQLLQGWCDD

SEQ ID NO: 692 - protein, 21 aa, Artificial Sequence
  Description of Artificial Sequence: Synthetic peptide
TVDHTQFYDWFSRVLGESGSA

SEQ ID NO: 693 - protein, 21 aa, Artificial Sequence
  Description of Artificial Sequence: Synthetic peptide
GRQDREFYYWFELQAGGMDGD

SEQ ID NO: 694 - protein, 21 aa, Artificial Sequence
  Description of Artificial Sequence: Synthetic peptide
RLLLGGFYEWFDQVLKETKEV

SEQ ID NO: 695 - protein, 21 aa, Artificial Sequence
  Description of Artificial Sequence: Synthetic peptide
GVLSTGFYEWFALQLHGLAAG

SEQ ID NO: 696 - protein, 21 aa, Artificial Sequence
  Description of Artificial Sequence: Synthetic peptide
PAVGQSFYGWFEAVLRGSKAG

SEQ ID NO: 697 - protein, 21 aa, Artificial Sequence
  Description of Artificial Sequence: Synthetic peptide
SNGISGFYEWFAAQVQTSDFQ

SEQ ID NO: 698 - protein, 21 aa, Artificial Sequence
  Description of Artificial Sequence: Synthetic peptide
LLGLSQAAYANFYDWFVSQLA

SEQ ID NO: 699 - protein, 21 aa, Artificial Sequence
  Description of Artificial Sequence: Synthetic peptide
VPNSWMFYNWFAEQIEGSEGE

SEQ ID NO: 700 - protein, 21 aa, Artificial Sequence
  Description of Artificial Sequence: Synthetic peptide
ARRADGFYDWFREQVSGSAVQ

SEQ ID NO: 701 - protein, 21 aa, Artificial Sequence
  Description of Artificial Sequence: Synthetic peptide
GVVEGTFYEWFDRLLGGVQGD

SEQ ID NO: 702 - protein, 21 aa, Artificial Sequence
  Description of Artificial Sequence: Synthetic peptide
SHLTDPFYQWFVDQLRAGVRG

SEQ ID NO: 703 - protein, 21 aa, Artificial Sequence
  Description of Artificial Sequence: Synthetic peptide
RSNDDAFYRWFSNILQVDGGG

SEQ ID NO: 704 - protein, 21 aa, Artificial Sequence
  Description of Artificial Sequence: Synthetic peptide
DSDGAQFYIWFEDQLRSAGWD

SEQ ID NO: 705 - protein, 21 aa, Artificial Sequence
  Description of Artificial Sequence: Synthetic peptide
PGLHRAFYQWFAEAVRSANKE

SEQ ID NO: 706 - protein, 20 aa, Artificial Sequence
  Description of Artificial Sequence: Synthetic peptide
SLGQGGFYDWFASQVGGADI

SEQ ID NO: 707 - protein, 21 aa, Artificial Sequence
  Description of Artificial Sequence: Synthetic peptide
CGQTQSFYQWFCEVMRVESGD

SEQ ID NO: 708 - protein, 21 aa, Artificial Sequence
  Description of Artificial Sequence: Synthetic peptide
IVVPGDTQGVNFYDWFVKQLQ

SEQ ID NO: 709 - protein, 21 aa, Artificial Sequence
  Description of Artificial Sequence: Synthetic peptide
RDVSMGSASTNFYDWFVQQLG

SEQ ID NO: 710 - protein, 21 aa, Artificial Sequence
  Description of Artificial Sequence: Synthetic peptide
SQAGSAFYAWFDQVLRTVHSA

SEQ ID NO: 711 - protein, 21 aa, Artificial Sequence
  Description of Artificial Sequence: Synthetic peptide
SNGISGFYEWFAAQVQTSDFQ

SEQ ID NO: 712 - protein, 17 aa, Artificial Sequence
  Description of Artificial Sequence: Synthetic peptide
RRDRGGLDVFFYQWFMD

SEQ ID NO: 713 - protein, 20 aa, Artificial Sequence
  Description of Artificial Sequence: Synthetic peptide
HLCVLEELFWGASLFGYCSG

SEQ ID NO: 714 - protein, 20 aa, Artificial Sequence
  Description of Artificial Sequence: Synthetic peptide
PLCVLEELFWSTPLFGQCSY

SEQ ID NO: 715 - protein, 20 aa, Artificial Sequence
  Description of Artificial Sequence: Synthetic peptide
HLCVLEELFWGASLFAQCVG

SEQ ID NO: 716 - protein, 20 aa, Artificial Sequence
  Description of Artificial Sequence: Synthetic peptide
DLCVLEELFWGASRFGQCSG

SEQ ID NO: 717 - protein, 20 aa, Artificial Sequence
  Description of Artificial Sequence: Synthetic peptide
HLCVLEELFWGASLFGQCAG

SEQ ID NO: 718 - protein, 20 aa, Artificial Sequence
  Description of Artificial Sequence: Synthetic peptide
HLCVVEELFWGASLFGQCSG

SEQ ID NO: 719 - protein, 20 aa, Artificial Sequence
  Description of Artificial Sequence: Synthetic peptide
NLCDLEVLFWGASLFRQCSG

SEQ ID NO: 720 - protein, 20 aa, Artificial Sequence
  Description of Artificial Sequence: Synthetic peptide
PLCVLEEQFWGASLFGQCSG

SEQ ID NO: 721 - protein, 20 aa, Artificial Sequence
  Description of Artificial Sequence: Synthetic peptide
QLCVLEELFWGASEFGQCSG

SEQ ID NO: 722 - protein, 20 aa, Artificial Sequence
  Description of Artificial Sequence: Synthetic peptide
HLCELEELFWGASLFGQCSG

SEQ ID NO: 723 - protein, 20 aa, Artificial Sequence
  Description of Artificial Sequence: Synthetic peptide
PLCVLEELFWGESLFGQCSG

SEQ ID NO: 724 - protein, 20 aa, Artificial Sequence
  Description of Artificial Sequence: Synthetic peptide
HLCVLEELFWGASRFGQCSG

SEQ ID NO: 725 - protein, 20 aa, Artificial Sequence
  Description of Artificial Sequence: Synthetic peptide
KLCVLEELFWGASLFGQCSG

SEQ ID NO: 726 - protein, 20 aa, Artificial Sequence
  Description of Artificial Sequence: Synthetic peptide
YLCVLEELSWGASLFGQCSG

SEQ ID NO: 727 - protein, 20 aa, Artificial Sequence
  Description of Artificial Sequence: Synthetic peptide
HLCVLEELLWGASLFAQCSG

SEQ ID NO: 728 - protein, 20 aa, Artificial Sequence
  Description of Artificial Sequence: Synthetic peptide
QLCVLEQLFWGESLFGQCSG

SEQ ID NO: 729 - protein, 20 aa, Artificial Sequence
  Description of Artificial Sequence: Synthetic peptide
HLCVLEELFWGGNLFSQCSG

SEQ ID NO: 730 - protein, 20 aa, Artificial Sequence
  Description of Artificial Sequence: Synthetic peptide
HLCVLEELFWGASLYGQCSG

SEQ ID NO: 731 - protein, 20 aa, Artificial Sequence
  Description of Artificial Sequence: Synthetic peptide
SLCALEEQFWGAALFGYCSG

SEQ ID NO: 732 - protein, 20 aa, Artificial Sequence
  Description of Artificial Sequence: Synthetic peptide
HLCVLEEQFWGASLFDGCAG

SEQ ID NO: 733 - protein, 20 aa, Artificial Sequence
  Description of Artificial Sequence: Synthetic peptide
QLCVLEELFWGASLFGQCSG

SEQ ID NO: 734 - protein, 20 aa, Artificial Sequence
  Description of Artificial Sequence: Synthetic peptide
PLCVLEELFWGAALFGQCSG

SEQ ID NO: 735 - protein, 20 aa, Artificial Sequence
  Description of Artificial Sequence: Synthetic peptide
HLCVLEELFWGASLFGQCTG

SEQ ID NO: 736 - protein, 20 aa, Artificial Sequence
  Description of Artificial Sequence: Synthetic peptide
PLCVLEELFWGGSLFGQCSG

SEQ ID NO: 737 - protein, 20 aa, Artificial Sequence
  Description of Artificial Sequence: Synthetic peptide
QLCVLEELVWGASLFGQCSG

SEQ ID NO: 738 - protein, 20 aa, Artificial Sequence
  Description of Artificial Sequence: Synthetic peptide
HLCVVEELIWGASLFGQCSR

SEQ ID NO: 739 - protein, 20 aa, Artificial Sequence
  Description of Artificial Sequence: Synthetic peptide
DLCVLEELFWGASLFGQCAG

SEQ ID NO: 740 - protein, 20 aa, Artificial Sequence
  Description of Artificial Sequence: Synthetic peptide
QLCVLEERFWGASLFGQCSG

SEQ ID NO: 741 - protein, 20 aa, Artificial Sequence
  Description of Artificial Sequence: Synthetic peptide
NLCVLEELFWGAALFGQCSG

SEQ ID NO: 742 - protein, 20 aa, Artificial Sequence
  Description of Artificial Sequence: Synthetic peptide
QLCVLEELFWGSSLFGQCSG

SEQ ID NO: 743 - protein, 20 aa, Artificial Sequence
  Description of Artificial Sequence: Synthetic peptide
DLCVVEELFWGKSLFGQCSG

SEQ ID NO: 744 - protein, 20 aa, Artificial Sequence
  Description of Artificial Sequence: Synthetic peptide
DLCVLEELFWGSSLFGQCSG

SEQ ID NO: 745 - protein, 20 aa, Artificial Sequence
  Description of Artificial Sequence: Synthetic peptide
YLCVLEEQFWGASLFRQCFG

SEQ ID NO: 746 - protein, 20 aa, Artificial Sequence
  Description of Artificial Sequence: Synthetic peptide
HLCVLEELLWGSSLFGQCSG

SEQ ID NO: 747 - protein, 20 aa, Artificial Sequence
  Description of Artificial Sequence: Synthetic peptide
PLCGLEELFWGASLFGQCSD

SEQ ID NO: 748 - protein, 20 aa, Artificial Sequence
  Description of Artificial Sequence: Synthetic peptide
HLCVLEELFWGSSLFAQCSG

SEQ ID NO: 749 - protein, 20 aa, Artificial Sequence
  Description of Artificial Sequence: Synthetic peptide
PLCAIEELFWGAALFGQCSG

SEQ ID NO: 750 - protein, 20 aa, Artificial Sequence
  Description of Artificial Sequence: Synthetic peptide
HLCVLEEQFWGASLFGDCSG

SEQ ID NO: 751 - protein, 20 aa, Artificial Sequence
  Description of Artificial Sequence: Synthetic peptide
PLCVLEELFWGAPLFGQCSD

SEQ ID NO: 752 - protein, 20 aa, Artificial Sequence
  Description of Artificial Sequence: Synthetic peptide
DLCGLEELFWGAALFGQCTS

SEQ ID NO: 753 - protein, 20 aa, Artificial Sequence
  Description of Artificial Sequence: Synthetic peptide
QLCVLEKQLWGASLFWQCSG

SEQ ID NO: 754 - protein, 20 aa, Artificial Sequence
  Description of Artificial Sequence: Synthetic peptide
HLCVLEELFWGASLYGQCPG

SEQ ID NO: 755 - protein, 20 aa, Artificial Sequence
  Description of Artificial Sequence: Synthetic peptide
HLCVLEELFWGASLFDQCSG

SEQ ID NO: 756 - protein, 20 aa, Artificial Sequence
  Description of Artificial Sequence: Synthetic peptide
HLCVLEELLWGASLFGQCSG

SEQ ID NO: 757 - protein, 20 aa, Artificial Sequence
  Description of Artificial Sequence: Synthetic peptide
PLCVLEELFWGVSLFGQCGG

SEQ ID NO: 758 - protein, 20 aa, Artificial Sequence
  Description of Artificial Sequence: Synthetic peptide
HLCVLEELFWGASQWGQCSG

SEQ ID NO: 759 - protein, 20 aa, Artificial Sequence
  Description of Artificial Sequence: Synthetic peptide
RLCVLEEQFWGGALFGQCSG

SEQ ID NO: 760 - protein, 20 aa, Artificial Sequence
  Description of Artificial Sequence: Synthetic peptide
QLCVLEELFWGVSLFAQCSG

SEQ ID NO: 761 - protein, 20 aa, Artificial Sequence
  Description of Artificial Sequence: Synthetic peptide
HLCVLEELFWGAALFGQCFG

SEQ ID NO: 762 - protein, 20 aa, Artificial Sequence
  Description of Artificial Sequence: Synthetic peptide
YLCVLEELFWGASQFGQCSG

SEQ ID NO: 763 - protein, 20 aa, Artificial Sequence
  Description of Artificial Sequence: Synthetic peptide
HLCVLEELYWGASLFGQCSG

SEQ ID NO: 764 - protein, 20 aa, Artificial Sequence
  Description of Artificial Sequence: Synthetic peptide
HLCVLEERFWGVSLFGQCSG

SEQ ID NO: 765 - protein, 20 aa, Artificial Sequence
  Description of Artificial Sequence: Synthetic peptide
PLCVLEELFWGASRFGQCSG

SEQ ID NO: 766 - protein, 20 aa, Artificial Sequence
  Description of Artificial Sequence: Synthetic peptide
HLCVLEDLFWGASLFDQCSG

SEQ ID NO: 767 - protein, 20 aa, Artificial Sequence
  Description of Artificial Sequence: Synthetic peptide
HLCDLEVLFWGASLFGQCSG

SEQ ID NO: 768 - protein, 20 aa, Artificial Sequence
  Description of Artificial Sequence: Synthetic peptide
QLCILEEQFWGTSLFGYCSG

SEQ ID NO: 769 - protein, 20 aa, Artificial Sequence
  Description of Artificial Sequence: Synthetic peptide
ALCVLEELFWGESLFGQCSG

SEQ ID NO: 770 - protein, 20 aa, Artificial Sequence
  Description of Artificial Sequence: Synthetic peptide
RLCVLEERFWGAALFGQCSG

SEQ ID NO: 771 - protein, 20 aa, Artificial Sequence
  Description of Artificial Sequence: Synthetic peptide
PLCVLEELFWGASLFGQCSG

SEQ ID NO: 772 - protein, 20 aa, Artificial Sequence
  Description of Artificial Sequence: Synthetic peptide
SLCVLEELFWGGSRFGQCSG

SEQ ID NO: 773 - protein, 20 aa, Artificial Sequence
  Description of Artificial Sequence: Synthetic peptide
HLCLLEEQFWGASLFGYCFE

SEQ ID NO: 774 - protein, 20 aa, Artificial Sequence
  Description of Artificial Sequence: Synthetic peptide
HLCVLEEQFWGASLFGQCSG

SEQ ID NO: 775 - protein, 20 aa, Artificial Sequence
  Description of Artificial Sequence: Synthetic peptide
DLCLLEELLWGASRFGQCSG

SEQ ID NO: 776 - protein, 20 aa, Artificial Sequence
  Description of Artificial Sequence: Synthetic peptide
YLCVLEERFWGASLFGQCSG

SEQ ID NO: 777 - protein, 20 aa, Artificial Sequence
  Description of Artificial Sequence: Synthetic peptide
HLCVLEEQFWGASLFGSCSG

SEQ ID NO: 778 - protein, 20 aa, Artificial Sequence
  Description of Artificial Sequence: Synthetic peptide
QLCVLEEQLWGASLFGQCSG

SEQ ID NO: 779 - protein, 20 aa, Artificial Sequence
  Description of Artificial Sequence: Synthetic peptide
  MOD_RES (10): Unknown amino acid; translation read-through at TGA stop codon
HLCVLEELFXGESLFGYCSG

SEQ ID NO: 780 - protein, 20 aa, Artificial Sequence
  Description of Artificial Sequence: Synthetic peptide
HLCVLEELFWGASLFGQCSG

SEQ ID NO: 781 - protein, 20 aa, Artificial Sequence
  Description of Artificial Sequence: Synthetic peptide
PLCVLEELFWGASHFGQCSG

SEQ ID NO: 782 - protein, 20 aa, Artificial Sequence
  Description of Artificial Sequence: Synthetic peptide
HLCVLEELVWGASLFGQCAG

SEQ ID NO: 783 - protein, 20 aa, Artificial Sequence
  Description of Artificial Sequence: Synthetic peptide
QLCVLEELIWGASLFGQCAG

SEQ ID NO: 784 - protein, 20 aa, Artificial Sequence
  Description of Artificial Sequence: Synthetic peptide
HLCGLEELFWGASLFGQCSG

SEQ ID NO: 785 - protein, 20 aa, Artificial Sequence
  Description of Artificial Sequence: Synthetic peptide
HLCVLEELVWGESLFGQCSG

SEQ ID NO: 786 - protein, 20 aa, Artificial Sequence
  Description of Artificial Sequence: Synthetic peptide
RLCVLEELYWGASLFGQCSG

SEQ ID NO: 787 - protein, 20 aa, Artificial Sequence
  Description of Artificial Sequence: Synthetic peptide
RLCILEELFWGASLFGQCSG

SEQ ID NO: 788 - protein, 20 aa, Artificial Sequence
  Description of Artificial Sequence: Synthetic peptide
HLCVLEELFWGATLFDQCSG

SEQ ID NO: 789 - protein, 20 aa, Artificial Sequence
  Description of Artificial Sequence: Synthetic peptide
HLCFLEELFWGASMFGQCSG

SEQ ID NO: 790 - protein, 20 aa, Artificial Sequence
  Description of Artificial Sequence: Synthetic peptide
HLCIVEELFWAAPLFGQCSG

SEQ ID NO: 791 - protein, 20 aa, Artificial Sequence
  Description of Artificial Sequence: Synthetic peptide
HLCVLEELWWGASLFAQCSA

SEQ ID NO: 792 - protein, 20 aa, Artificial Sequence
  Description of Artificial Sequence: Synthetic peptide
NLCALEELFWGASQFRYCPG

SEQ ID NO: 793 - protein, 20 aa, Artificial Sequence
  Description of Artificial Sequence: Synthetic peptide
RLCVLEELFWGASLFGQCSG

SEQ ID NO: 794 - protein, 20 aa, Artificial Sequence
  Description of Artificial Sequence: Synthetic peptide
PLCVLEELFWGASLFGQCPG

SEQ ID NO: 795 - protein, 20 aa, Artificial Sequence
  Description of Artificial Sequence: Synthetic peptide
NLCVLEELFWGASLFGQCSG

SEQ ID NO: 796 - protein, 20 aa, Artificial Sequence
  Description of Artificial Sequence: Synthetic peptide
  MOD_RES (7): Unknown amino acid; translation read-through at TAA stop codon
QLCVLGXRFWGGSLCGYCSD

SEQ ID NO: 797 - protein, 20 aa, Artificial Sequence
  Description of Artificial Sequence: Synthetic peptide
PLCFLQELFGGASLGGYCSG

SEQ ID NO: 798 - protein, 20 aa, Artificial Sequence
  Description of Artificial Sequence: Synthetic peptide
FMCGLQELVGGAALLGHCSG

SEQ ID NO: 799 - protein, 20 aa, Artificial Sequence
  Description of Artificial Sequence: Synthetic peptide
PLCFLQELFGGGSLSGYCSG

SEQ ID NO: 800 - protein, 20 aa, Artificial Sequence
  Description of Artificial Sequence: Synthetic peptide
FLCGLEELAWGVSRSGYCFG

SEQ ID NO: 801 - protein, 20 aa, Artificial Sequence
  Description of Artificial Sequence: Synthetic peptide
PLCFLAELFSGSALGGDCSR

SEQ ID NO: 802 - protein, 20 aa, Artificial Sequence
  Description of Artificial Sequence: Synthetic peptide
PLCVLQELFGGGSLGGYCSG

SEQ ID NO: 803 - protein, 20 aa, Artificial Sequence
  Description of Artificial Sequence: Synthetic peptide
  MOD_RES (7): Unknown amino acid; translation read-through at TAA stop codon
QLCVLEXLFWGACLFGYCAG

SEQ ID NO: 804 - protein, 20 aa, Artificial Sequence
  Description of Artificial Sequence: Synthetic peptide
FLCGLQELSGVASLFGQCSG

SEQ ID NO: 805 - protein, 20 aa, Artificial Sequence
  Description of Artificial Sequence: Synthetic peptide
  MOD_RES (18): Unknown amino acid; translation read-through at TGA stop codon
RVCVLEQLVWGASLFGAXSG

SEQ ID NO: 806 - protein, 20 aa, Artificial Sequence
  Description of Artificial Sequence: Synthetic peptide
FYCGLEELSWGAALFGYCSG

SEQ ID NO: 807 - protein, 20 aa, Artificial Sequence
  Description of Artificial Sequence: Synthetic peptide
FLCGLEELSQGAVLFGHCYG

SEQ ID NO: 808 - protein, 20 aa, Artificial Sequence
  Description of Artificial Sequence: Synthetic peptide
HLCVLVGLFWDASLFGQCSG

SEQ ID NO: 809 - protein, 20 aa, Artificial Sequence
  Description of Artificial Sequence: Synthetic peptide
QRCIRAALFWCATLLGGCAG

SEQ ID NO: 810 - protein, 20 aa, Artificial Sequence
  Description of Artificial Sequence: Synthetic peptide
HQCIPDGMSQGAALRGNCSD

SEQ ID NO: 811 - protein, 20 aa, Artificial Sequence
  Description of Artificial Sequence: Synthetic peptide
HLCVLEDELWGVSLFGYCSS

SEQ ID NO: 812 - protein, 20 aa, Artificial Sequence
  Description of Artificial Sequence: Synthetic peptide
HLCMLEEQFWGASLFSRCSG

SEQ ID NO: 813 - protein, 20 aa, Artificial Sequence
  Description of Artificial Sequence: Synthetic peptide
TCAFWKNGSGVRRCSVTAVV

SEQ ID NO: 814 - protein, 20 aa, Artificial Sequence
  Description of Artificial Sequence: Synthetic peptide
  MOD_RES (8): Unknown amino acid
PLCGLKNXSGVRLCSSPALV

SEQ ID NO: 815 - protein, 20 aa, Artificial Sequence
  Description of Artificial Sequence: Synthetic peptide
PLCLQEELFWGASLFGYCSG

SEQ ID NO: 816 - protein, 20 aa, Artificial Sequence
  Description of Artificial Sequence: Synthetic peptide
PLCDLEELFWGASLFGDCPG

SEQ ID NO: 817 - protein, 20 aa, Artificial Sequence
  Description of Artificial Sequence: Synthetic peptide
DLCVLEELFWDGSLFASCSG

SEQ ID NO: 818 - protein, 20 aa, Artificial Sequence
  Description of Artificial Sequence: Synthetic peptide
PLCVLEEQLWGTALFGSCTG

SEQ ID NO: 819 - protein, 20 aa, Artificial Sequence
  Description of Artificial Sequence: Synthetic peptide
PLCLVEELLWGASLFSQCTG

SEQ ID NO: 820 - protein, 20 aa, Artificial Sequence
  Description of Artificial Sequence: Synthetic peptide
PLCDLEELYWGAALFGSCSG

SEQ ID NO: 821 - protein, 20 aa, Artificial Sequence
  Description of Artificial Sequence: Synthetic peptide
GLCFLEEQFWGTSLFRDCPG

SEQ ID NO: 822 - protein, 20 aa, Artificial Sequence
  Description of Artificial Sequence: Synthetic peptide
PLCVVEELFWGASLYGQCSG

SEQ ID NO: 823 - protein, 20 aa, Artificial Sequence
  Description of Artificial Sequence: Synthetic peptide
RLCVLEELFWGASRFRGCSG

SEQ ID NO: 824 - protein, 20 aa, Artificial Sequence
  Description of Artificial Sequence: Synthetic peptide
PLCVLEELHWGAALFGYCSG

SEQ ID NO: 825 - protein, 20 aa, Artificial Sequence
  Description of Artificial Sequence: Synthetic peptide
NLCVVEELFWGASLFPNCSG

SEQ ID NO: 826 - protein, 20 aa, Artificial Sequence
  Description of Artificial Sequence: Synthetic peptide
QLCVLEELFWGASMFEDCSG

SEQ ID NO: 827 - protein, 20 aa, Artificial Sequence
  Description of Artificial Sequence: Synthetic peptide
HLCVLEEQFWGASLFGQCSG

SEQ ID NO: 828 - protein, 20 aa, Artificial Sequence
  Description of Artificial Sequence: Synthetic peptide
PLCVLEEIYWGAALFGDCYG

SEQ ID NO: 829 - protein, 19 aa, Artificial Sequence
  Description of Artificial Sequence: Synthetic peptide
PLCVLEELFWGLSLDKNCS

SEQ ID NO: 830 - protein, 20 aa, Artificial Sequence
  Description of Artificial Sequence: Synthetic peptide
QLCVLEELFWGASLFSGCSG

SEQ ID NO: 831 - protein, 20 aa, Artificial Sequence
  Description of Artificial Sequence: Synthetic peptide
PLCDLEALFWGESLFGGCSG

SEQ ID NO: 832 - protein, 20 aa, Artificial Sequence
  Description of Artificial Sequence: Synthetic peptide
HLCVLEEMFWGTSHFDGCSG

SEQ ID NO: 833 - protein, 20 aa, Artificial Sequence
  Description of Artificial Sequence: Synthetic peptide
DLCVLEELFWGAPLFGLCSG

SEQ ID NO: 834 - protein, 20 aa, Artificial Sequence
  Description of Artificial Sequence: Synthetic peptide
DLCVLEELFWGVALYGGCSG

SEQ ID NO: 835 - protein, 20 aa, Artificial Sequence
  Description of Artificial Sequence: Synthetic peptide
QLCVLEELYWGASLFGHCSG

SEQ ID NO: 836 - protein, 20 aa, Artificial Sequence
  Description of Artificial Sequence: Synthetic peptide
HLCVLEDRFWGASLFGPCSG

SEQ ID NO: 837 - protein, 20 aa, Artificial Sequence
  Description of Artificial Sequence: Synthetic peptide
HLCGMEEMFWGVALFRNCSG

SEQ ID NO: 838 - protein, 20 aa, Artificial Sequence
  Description of Artificial Sequence: Synthetic peptide
PLCVLEQLYWGESLFVYCSG

SEQ ID NO: 839 - protein, 20 aa, Artificial Sequence
  Description of Artificial Sequence: Synthetic peptide
HLCLLEELFWGEALWGYCSG

SEQ ID NO: 840 - protein, 20 aa, Artificial Sequence
  Description of Artificial Sequence: Synthetic peptide
QLCVMEELFWGASRFGQCSG

SEQ ID NO: 841 - protein, 20 aa, Artificial Sequence
  Description of Artificial Sequence: Synthetic peptide
HLCVLEELFWGASMFGQCSG

SEQ ID NO: 842 - protein, 20 aa, Artificial Sequence
  Description of Artificial Sequence: Synthetic peptide
QLCVLEEMFWGGSRFVQCSA

SEQ ID NO: 843 - protein, 20 aa, Artificial Sequence
  Description of Artificial Sequence: Synthetic peptide
PLCILEELFWGEALFDQCGA

SEQ ID NO: 844 - protein, 20 aa, Artificial Sequence
  Description of Artificial Sequence: Synthetic peptide
YLCVQEELFWGASLFGYCSV

SEQ ID NO: 845 - protein, 20 aa, Artificial Sequence
  Description of Artificial Sequence: Synthetic peptide
HLCALEEAFFGPSLFNSCQG

SEQ ID NO: 846 - protein, 20 aa, Artificial Sequence
  Description of Artificial Sequence: Synthetic peptide
HLCVLEERFWGASLFGQCSG

SEQ ID NO: 847 - protein, 20 aa, Artificial Sequence
  Description of Artificial Sequence: Synthetic peptide
QLCDLEELFWGASLFGYCPG

SEQ ID NO: 848 - protein, 20 aa, Artificial Sequence
  Description of Artificial Sequence: Synthetic peptide
HLCVLEERFWGASIWGSCSG

SEQ ID NO: 849 - protein, 20 aa, Artificial Sequence
  Description of Artificial Sequence: Synthetic peptide
QLCVLEELFWGGSLWGQCSR

SEQ ID NO: 850 - protein, 20 aa, Artificial Sequence
  Description of Artificial Sequence: Synthetic peptide
PLCVLEELFWGAAQFGQCSG

SEQ ID NO: 851 - protein, 20 aa, Artificial Sequence
  Description of Artificial Sequence: Synthetic peptide
QLCDLEERFWGVSLFGLCSG

SEQ ID NO: 852 - protein, 20 aa, Artificial Sequence
  Description of Artificial Sequence: Synthetic peptide
QLCVLEEVFWGASLFGLCTG

SEQ ID NO: 853 - protein, 20 aa, Artificial Sequence
  Description of Artificial Sequence: Synthetic peptide
  MOD_RES (3): Unknown amino acid
QLXDLNTWSGLCLCSVTVRV

SEQ ID NO: 854 - protein, 20 aa, Artificial Sequence
  Description of Artificial Sequence: Synthetic peptide
DLCVLEESLWGKALFGYCSD

SEQ ID NO: 855 - protein, 20 aa, Artificial Sequence
  Description of Artificial Sequence: Synthetic peptide
HLCVLEEVFWGSSMFGDCSG

SEQ ID NO: 856 - protein, 20 aa, Artificial Sequence
  Description of Artificial Sequence: Synthetic peptide
HLCDLEELFWGASLFGDCQG

SEQ ID NO: 857 - protein, 20 aa, Artificial Sequence
  Description of Artificial Sequence: Synthetic peptide
QLCVLDALMWGGCRLGHQCG

SEQ ID NO: 858 - protein, 20 aa, Artificial Sequence
  Description of Artificial Sequence: Synthetic peptide
QLCVLEEKFWGTSLFGDCMG

SEQ ID NO: 859 - protein, 20 aa, Artificial Sequence
  Description of Artificial Sequence: Synthetic peptide
HLCVLEEVFWGAAQFGSCSG

SEQ ID NO: 860 - protein, 20 aa, Artificial Sequence
  Description of Artificial Sequence: Synthetic peptide
QLCVLEELFWGPSMFGYCSG

SEQ ID NO: 861 - protein, 20 aa, Artificial Sequence
  Description of Artificial Sequence: Synthetic peptide
HLCDLEELFWGASGFAQCYG

SEQ ID NO: 862 - protein, 20 aa, Artificial Sequence
  Description of Artificial Sequence: Synthetic peptide
DLCVLEERFWGASLFGQCSG

SEQ ID NO: 863 - protein, 20 aa, Artificial Sequence
  Description of Artificial Sequence: Synthetic peptide
QLCVLEELHWGASLFGYCSG

SEQ ID NO: 864 - protein, 20 aa, Artificial Sequence
  Description of Artificial Sequence: Synthetic peptide
PLCVLEEQFWGASLFGQCSG

SEQ ID NO: 865 - protein, 20 aa, Artificial Sequence
  Description of Artificial Sequence: Synthetic peptide
YLCDLEERFWGASLFGQCSS

SEQ ID NO: 866 - protein, 20 aa, Artificial Sequence
  Description of Artificial Sequence: Synthetic peptide
HLCLLEERFWGSSQFGFCSG

SEQ ID NO: 867 - protein, 20 aa, Artificial Sequence
  Description of Artificial Sequence: Synthetic peptide
HLCVLEELFWGASQFGQCSG

SEQ ID NO: 868 - protein, 20 aa, Artificial Sequence
  Description of Artificial Sequence: Synthetic peptide
HLCYLEERFWGASLFGQCSG

SEQ ID NO: 869 - protein, 20 aa, Artificial Sequence
  Description of Artificial Sequence: Synthetic peptide
HLCVMEELFWGTSLFGQCTG

SEQ ID NO: 870 - protein, 20 aa, Artificial Sequence
  Description of Artificial Sequence: Synthetic peptide
HLCVLEERFWGASLFGQCSG

SEQ ID NO: 871 - protein, 20 aa, Artificial Sequence
  Description of Artificial Sequence: Synthetic peptide
HLCVLEERFWGASLFSQCSG

SEQ ID NO: 872 - protein, 20 aa, Artificial Sequence
  Description of Artificial Sequence: Synthetic peptide
HLCVLEELFWGASLFGQCSG

SEQ ID NO: 873 - protein, 20 aa, Artificial Sequence
  Description of Artificial Sequence: Synthetic peptide
QLCLLEELFWGAASFGQCSG

SEQ ID NO: 874 - protein, 20 aa, Artificial Sequence
  Description of Artificial Sequence: Synthetic peptide
HLCVLEEMFWGASLFGQCSG

SEQ ID NO: 875 - protein, 20 aa, Artificial Sequence
  Description of Artificial Sequence: Synthetic peptide
HLCDLEELFWGASLFSQCSR

SEQ ID NO: 876 - protein, 20 aa, Artificial Sequence
  Description of Artificial Sequence: Synthetic peptide
QLCVLEELFWGASQFGYCSG

SEQ ID NO: 877 - protein, 20 aa, Artificial Sequence
  Description of Artificial Sequence: Synthetic peptide
QLCALEEQFWGASLFSQCSG

SEQ ID NO: 878 - protein, 20 aa, Artificial Sequence
  Description of Artificial Sequence: Synthetic peptide
QLCVLEELFWGASLFGYCSG

SEQ ID NO: 879 - protein, 20 aa, Artificial Sequence
  Description of Artificial Sequence: Synthetic peptide
HLCVLEEWFWGDSLFGQCSR

SEQ ID NO: 880 - protein, 20 aa, Artificial Sequence
  Description of Artificial Sequence: Synthetic peptide
HLCVLEERFWGASLFGQCSG

SEQ ID NO: 881 - protein, 20 aa, Artificial Sequence
  Description of Artificial Sequence: Synthetic peptide
QLCELEEVFWGASLFDYCSG

SEQ ID NO: 882 - protein, 20 aa, Artificial Sequence
  Description of Artificial Sequence: Synthetic peptide
HLCVLEELFWGASRFGQCSG

SEQ ID NO: 883 - protein, 20 aa, Artificial Sequence
  Description of Artificial Sequence: Synthetic peptide
HLCVLEELFWGASLFGQCSA

SEQ ID NO: 884 - protein, 20 aa, Artificial Sequence
  Description of Artificial Sequence: Synthetic peptide
HLCVLEELIWGASRFGQCSG

SEQ ID NO: 885 - protein, 20 aa, Artificial Sequence
  Description of Artificial Sequence: Synthetic peptide
HLCVLEELFWGGSLFIQCSG

SEQ ID NO: 886 - protein, 20 aa, Artificial Sequence
  Description of Artificial Sequence: Synthetic peptide
QLCVLEEQFWGASLFGNCSG

SEQ ID NO: 887 - protein, 20 aa, Artificial Sequence
  Description of Artificial Sequence: Synthetic peptide
HLCVLEERFWGAALFGQCSG

SEQ ID NO: 888 - protein, 20 aa, Artificial Sequence
  Description of Artificial Sequence: Synthetic peptide
HLCILEEMFWGASLFGQCGG

SEQ ID NO: 889 - protein, 20 aa, Artificial Sequence
  Description of Artificial Sequence: Synthetic peptide
PLCVLEELVWGASLFVQCSG

SEQ ID NO: 890 - protein, 20 aa, Artificial Sequence
  Description of Artificial Sequence: Synthetic peptide
NLCVLEELFWGESLFGQCSG

SEQ ID NO: 891 - protein, 20 aa, Artificial Sequence
  Description of Artificial Sequence: Synthetic peptide
HLCVLEEQFWGGSLFGYCSR

SEQ ID NO: 892 - protein, 20 aa, Artificial Sequence
  Description of Artificial Sequence: Synthetic peptide
HLCFLEEVFWGAALFAQCSG

SEQ ID NO: 893 - protein, 20 aa, Artificial Sequence
  Description of Artificial Sequence: Synthetic peptide
HLCDLEVLFWGSALFGQCSG

SEQ ID NO: 894 - protein, 20 aa, Artificial Sequence
  Description of Artificial Sequence: Synthetic peptide
HLCVMEELFWGASLFGQCSG

SEQ ID NO: 895 - protein, 20 aa, Artificial Sequence
  Description of Artificial Sequence: Synthetic peptide
HLCVLEERFWGASLFWQCSG

SEQ ID NO: 896 - protein, 20 aa, Artificial Sequence
  Description of Artificial Sequence: Synthetic peptide
HLCVLEEQYWGESLFGYCSG

SEQ ID NO: 897 - protein, 20 aa, Artificial Sequence
  Description of Artificial Sequence: Synthetic peptide
PLCVLEEQFWGASLFAYCSS

SEQ ID NO: 898 - protein, 20 aa, Artificial Sequence
  Description of Artificial Sequence: Synthetic peptide
QLCVLEELFWGESLFAQCLG

SEQ ID NO: 899 - protein, 20 aa, Artificial Sequence
  Description of Artificial Sequence: Synthetic peptide
HLCVLEELFWGQSLFGHCSD

SEQ ID NO: 900 - protein, 20 aa, Artificial Sequence
  Description of Artificial Sequence: Synthetic peptide
HLCVLEELVWGASLFGFCSG

SEQ ID NO: 901 - protein, 20 aa, Artificial Sequence
  Description of Artificial Sequence: Synthetic peptide
LLCVLEEQFWGASLFGQCSG

SEQ ID NO: 902 - protein, 20 aa, Artificial Sequence
  Description of Artificial Sequence: Synthetic peptide
RLCVLEELFWGESLFGQCSG

SEQ ID NO: 903 - protein, 20 aa, Artificial Sequence
  Description of Artificial Sequence: Synthetic peptide
HLCVLEEMFWGASLFGNCSG

SEQ ID NO: 904 - protein, 20 aa, Artificial Sequence
  Description of Artificial Sequence: Synthetic peptide
ELCFLEELFWGASLFGQCSG

SEQ ID NO: 905 - protein, 20 aa, Artificial Sequence
  Description of Artificial Sequence: Synthetic peptide
HLCVLEELFWGASLYGQCSS

SEQ ID NO: 906 - protein, 20 aa, Artificial Sequence
  Description of Artificial Sequence: Synthetic peptide
HLCVLEELFWGASLFAQCPG

SEQ ID NO: 907 - protein, 20 aa, Artificial Sequence
  Description of Artificial Sequence: Synthetic peptide
NLCVLEELFWGASEFGQCSG

SEQ ID NO: 908 - protein, 20 aa, Artificial Sequence
  Description of Artificial Sequence: Synthetic peptide
DLCVLEEQLWGASLFRYCSG

SEQ ID NO: 909 - protein, 20 aa, Artificial Sequence
  Description of Artificial Sequence: Synthetic peptide
HLCVLEEQFWGVALFGNCSG

SEQ ID NO: 910 - protein, 20 aa, Artificial Sequence
  Description of Artificial Sequence: Synthetic peptide
HLCVLEVQIWGASLFGQCSG

SEQ ID NO: 911 - protein, 20 aa, Artificial Sequence
  Description of Artificial Sequence: Synthetic peptide
HLCVLEERFWGGALFGQCTA

SEQ ID NO: 912 - protein, 20 aa, Artificial Sequence
  Description of Artificial Sequence: Synthetic peptide
HLCDLEELFWGASLFGQCSG

SEQ ID NO: 913 - protein, 20 aa, Artificial Sequence
  Description of Artificial Sequence: Synthetic peptide
QLCVLEELFWGTSLFAGCSG

SEQ ID NO: 914 - protein, 20 aa, Artificial Sequence
  Description of Artificial Sequence: Synthetic peptide
QLCGLEELFWGASLFGYCSA

SEQ ID NO: 915 - protein, 20 aa, Artificial Sequence
  Description of Artificial Sequence: Synthetic peptide
HLCVLEELFWGASLFGQCSS

SEQ ID NO: 916 - protein, 20 aa, Artificial Sequence
  Description of Artificial Sequence: Synthetic peptide
FLCVLEELYWGASQFGQCSG

SEQ ID NO: 917 - protein, 20 aa, Artificial Sequence
  Description of Artificial Sequence: Synthetic peptide
HLCVLEEQFWGASLFGYCSG

SEQ ID NO: 918 - protein, 20 aa, Artificial Sequence
  Description of Artificial Sequence: Synthetic peptide
RLCALEELFWGASLFGQCSG

SEQ ID NO: 919 - protein, 20 aa, Artificial Sequence
  Description of Artificial Sequence: Synthetic peptide
HLCVLEELFWGAALFHQCSG

SEQ ID NO: 920 - protein, 20 aa, Artificial Sequence
  Description of Artificial Sequence: Synthetic peptide
RLCVLEEQFWGASLFGQCSG

SEQ ID NO: 921 - protein, 20 aa, Artificial Sequence
  Description of Artificial Sequence: Synthetic peptide
QLCVLEELFWGSSRLGYCSG

SEQ ID NO: 922 - protein, 20 aa, Artificial Sequence
  Description of Artificial Sequence: Synthetic peptide
DLCVLEELFWGASLFGQCSG

SEQ ID NO: 923 - protein, 20 aa, Artificial Sequence
  Description of Artificial Sequence: Synthetic peptide
QLCLLEEQFWGGSLFGQCSG

SEQ ID NO: 924 - protein, 20 aa, Artificial Sequence
  Description of Artificial Sequence: Synthetic peptide
HLCVLEELFWGTSLFGQCSG

SEQ ID NO: 925 - protein, 20 aa, Artificial Sequence
  Description of Artificial Sequence: Synthetic peptide
RLCVLEELVWGASLFDQCSR

SEQ ID NO: 926 - protein, 20 aa, Artificial Sequence
  Description of Artificial Sequence: Synthetic peptide
EIEAEWGRVRCLVYGRCVGG

SEQ ID NO: 927 - protein, 20 aa, Artificial Sequence
  Description of Artificial Sequence: Synthetic peptide
EIEAEWGRVRCLVYGRCVGG

SEQ ID NO: 928 - protein, 20 aa, Artificial Sequence
  Description of Artificial Sequence: Synthetic peptide
WLDQEWAWVQCEVYGRGCPS

SEQ ID NO: 929 - protein, 20 aa, Artificial Sequence
  Description of Artificial Sequence: Synthetic peptide
WLDQEWAWVQCEVYGRGCPS

SEQ ID NO: 930 - protein, 20 aa, Artificial Sequence
  Description of Artificial Sequence: Synthetic peptide
WLDLEWAQVQCEVYGRGCPS

SEQ ID NO: 931 - protein, 20 aa, Artificial Sequence
  Description of Artificial Sequence: Synthetic peptide
WLDQEWAQVQCEVFGRGCPS

SEQ ID NO: 932 - protein, 20 aa, Artificial Sequence
  Description of Artificial Sequence: Synthetic peptide
WLDQEWQQVQCQVYGRGCTS

SEQ ID NO: 933 - protein, 20 aa, Artificial Sequence
  Description of Artificial Sequence: Synthetic peptide
RLDEEWARVQCEVWGRGCRS

SEQ ID NO: 934 - protein, 20 aa, Artificial Sequence
  Description of Artificial Sequence: Synthetic peptide
WLEQEWAWIQCEVYGRGCPS

SEQ ID NO: 935 - protein, 20 aa, Artificial Sequence
  Description of Artificial Sequence: Synthetic peptide
WLEQEWAQVQCEVYGRGCPS

SEQ ID NO: 936 - protein, 20 aa, Artificial Sequence
  Description of Artificial Sequence: Synthetic peptide
WLDEEWEWIQCKVYGRGCPA

SEQ ID NO: 937 - protein, 20 aa, Artificial Sequence
  Description of Artificial Sequence: Synthetic peptide
WLEQEWAWVQCEVYGRGCQS

SEQ ID NO: 938 - protein, 20 aa, Artificial Sequence
  Description of Artificial Sequence: Synthetic peptide
WLDQEWAWIQCEVYGRGCPA

SEQ ID NO: 939 - protein, 20 aa, Artificial Sequence
  Description of Artificial Sequence: Synthetic peptide
SLDWEWAWLQCEVYGRGCPS

SEQ ID NO: 940 - protein, 20 aa, Artificial Sequence
  Description of Artificial Sequence: Synthetic peptide
WLEQEWEQVRCLVYGRGCPP

SEQ ID NO: 941 - protein, 20 aa, Artificial Sequence
  Description of Artificial Sequence: Synthetic peptide
WLDQEWAWVQCEVYGRGCPY

SEQ ID NO: 942 - protein, 20 aa, Artificial Sequence
  Description of Artificial Sequence: Synthetic peptide
WLDQEWAGVLCEVYGRGCPS

SEQ ID NO: 943 - protein, 20 aa, Artificial Sequence
  Description of Artificial Sequence: Synthetic peptide
SLDKEWEWVLCVVYGRGCPS

SEQ ID NO: 944 - protein, 20 aa, Artificial Sequence
  Description of Artificial Sequence: Synthetic peptide
WLEQEWAQVQCEVYGRGCRS

SEQ ID NO: 945 - protein, 20 aa, Artificial Sequence
  Description of Artificial Sequence: Synthetic peptide
WLEEEWAQVQCAVYGRGCSS

SEQ ID NO: 946 - protein, 20 aa, Artificial Sequence
  Description of Artificial Sequence: Synthetic peptide
WLDQEWALVQCEVYGRGCPS

SEQ ID NO: 947 - protein, 20 aa, Artificial Sequence
  Description of Artificial Sequence: Synthetic peptide
WLDQEWAWVQCEVYGRGCPS

SEQ ID NO: 948 - protein, 20 aa, Artificial Sequence
  Description of Artificial Sequence: Synthetic peptide
WLEQEWAWVQCEVYGRGCAS

SEQ ID NO: 949 - protein, 20 aa, Artificial Sequence
  Description of Artificial Sequence: Synthetic peptide
WLDQEWAWVECEVYGRRCPS

SEQ ID NO: 950 - protein, 20 aa, Artificial Sequence
  Description of Artificial Sequence: Synthetic peptide
WLDQEWAWVECQVYGRGCPS

SEQ ID NO: 951 - protein, 20 aa, Artificial Sequence
  Description of Artificial Sequence: Synthetic peptide
QLDQEWAWVLCKVYGRGCPS

SEQ ID NO: 952 - protein, 20 aa, Artificial Sequence
  Description of Artificial Sequence: Synthetic peptide
  MOD_RES (6): Unknown amino acid; translation read-through at TGA stop codon
WLDHEXAWVQCEVYGRGCPS

SEQ ID NO: 953 - protein, 20 aa, Artificial Sequence
  Description of Artificial Sequence: Synthetic peptide
QLEQEWAWVRCEVYGRGCSS

SEQ ID NO: 954 - protein, 20 aa, Artificial Sequence
  Description of Artificial Sequence: Synthetic peptide
WLDQEWAWVQCQVYGRGCLS

SEQ ID NO: 955 - protein, 20 aa, Artificial Sequence
  Description of Artificial Sequence: Synthetic peptide
WLDQEWAWVRCEVYGLGCPS

SEQ ID NO: 956 - protein, 20 aa, Artificial Sequence
  Description of Artificial Sequence: Synthetic peptide
WLDQEWAVMKCELYGRGCPS

SEQ ID NO: 957 - protein, 20 aa, Artificial Sequence
  Description of Artificial Sequence: Synthetic peptide
WLEQEWAWVQCEVYGRGCLS

SEQ ID NO: 958 - protein, 20 aa, Artificial Sequence
  Description of Artificial Sequence: Synthetic peptide
SLDQEWAWVQCEVYGRGCLS

SEQ ID NO: 959 - protein, 20 aa, Artificial Sequence
  Description of Artificial Sequence: Synthetic peptide
WLDHEWAWVQCEVYGRGCTS

SEQ ID NO: 960 - protein, 20 aa, Artificial Sequence
  Description of Artificial Sequence: Synthetic peptide
WLDVEWAWVQCEVYGRGCPS

SEQ ID NO: 961 - protein, 20 aa, Artificial Sequence
  Description of Artificial Sequence: Synthetic peptide
QLDQEWARVRCEVWGRGCSS

SEQ ID NO: 962 - protein, 20 aa, Artificial Sequence
  Description of Artificial Sequence: Synthetic peptide
WLDLEWAQVQCKVYGRGCPS

SEQ ID NO: 963 - protein, 20 aa, Artificial Sequence
  Description of Artificial Sequence: Synthetic peptide
WLDEEWAWVQCQVYGRGCPS

SEQ ID NO: 964 - protein, 20 aa, Artificial Sequence
  Description of Artificial Sequence: Synthetic peptide
WLDQEWAWVQCEVWGRGCAF

SEQ ID NO: 965 - protein, 20 aa, Artificial Sequence
  Description of Artificial Sequence: Synthetic peptide
WLDREWAQVQCEVYGRGCLS

SEQ ID NO: 966 - protein, 20 aa, Artificial Sequence
  Description of Artificial Sequence: Synthetic peptide
WLDAEWEWVQCEVYGRGCRP

SEQ ID NO: 967 - protein, 20 aa, Artificial Sequence
  Description of Artificial Sequence: Synthetic peptide
SLDREWAYVQCQVYGRGCSS

SEQ ID NO: 968 - protein, 20 aa, Artificial Sequence
  Description of Artificial Sequence: Synthetic peptide
RLDLEWANIQCEVYGRGCPS

SEQ ID NO: 969 - protein, 20 aa, Artificial Sequence
  Description of Artificial Sequence: Synthetic peptide
WLEQEWARVQCEVYGRGCSS

SEQ ID NO: 970 - protein, 20 aa, Artificial Sequence
  Description of Artificial Sequence: Synthetic peptide
WLEQEWILVECEVYGRGCPT

SEQ ID NO: 971 - protein, 20 aa, Artificial Sequence
  Description of Artificial Sequence: Synthetic peptide
WLEQEWAQVQCEVWGRGCPS

SEQ ID NO: 972 - protein, 20 aa, Artificial Sequence
  Description of Artificial Sequence: Synthetic peptide
WLDQEWEWIQCEVYGRGCPL

SEQ ID NO: 973 - protein, 20 aa, Artificial Sequence
  Description of Artificial Sequence: Synthetic peptide
LLDEEWAQIECEIYGRGCPS

SEQ ID NO: 974 - protein, 20 aa, Artificial Sequence
  Description of Artificial Sequence: Synthetic peptide
ALEEEWAWVQCEVYGRGCHF

SEQ ID NO: 975 - protein, 20 aa, Artificial Sequence
  Description of Artificial Sequence: Synthetic peptide
  MOD_RES (2): Unknown amino acid
CXEQEWGLVQCEVYGRGCPS

SEQ ID NO: 976 - protein, 20 aa, Artificial Sequence
  Description of Artificial Sequence: Synthetic peptide
WLEQEWAYVQCEVYGRGCPS

SEQ ID NO: 977 - protein, 20 aa, Artificial Sequence
  Description of Artificial Sequence: Synthetic peptide
WLEHEWAQVQCEVWGRGCPY

SEQ ID NO: 978 - protein, 20 aa, Artificial Sequence
  Description of Artificial Sequence: Synthetic peptide
WLEQEWAEVRCEVYGRGCPR

SEQ ID NO: 979 - protein, 20 aa, Artificial Sequence
  Description of Artificial Sequence: Synthetic peptide
  MOD_RES (1): Unknown amino acid
XLEQEWAWVQCEVYGRGCPS

SEQ ID NO: 980 - protein, 20 aa, Artificial Sequence
  Description of Artificial Sequence: Synthetic peptide
WLEQEWAGIQCKVYGRGCPS

SEQ ID NO: 981 - protein, 20 aa, Artificial Sequence
  Description of Artificial Sequence: Synthetic peptide
RLEQEWAQVQCEVWGRGCLP

SEQ ID NO: 982 - protein, 20 aa, Artificial Sequence
  Description of Artificial Sequence: Synthetic peptide
QLDHEWAGIQCEVWGRGCPS

SEQ ID NO: 983 - protein, 20 aa, Artificial Sequence
  Description of Artificial Sequence: Synthetic peptide
WLEQEWAQIQCEVYGAGCRS

SEQ ID NO: 984 - protein, 20 aa, Artificial Sequence
  Description of Artificial Sequence: Synthetic peptide
SLEQEWAWVQCVVYGRGCPI

SEQ ID NO: 985 - protein, 20 aa, Artificial Sequence
  Description of Artificial Sequence: Synthetic peptide
WLEQEWDQVLCEVYGRGCPY

SEQ ID NO: 986 - protein, 20 aa, Artificial Sequence
  Description of Artificial Sequence: Synthetic peptide
  MOD_RES (10): Unknown amino acid
  MOD_RES (20): Unknown amino acid
WLEQEWAQVXCEVYGRGCAX

SEQ ID NO: 987 - protein, 20 aa, Artificial Sequence
  Description of Artificial Sequence: Synthetic peptide
WMDQEWAWVQCEVYGRGCPS

SEQ ID NO: 988 - protein, 20 aa, Artificial Sequence
  Description of Artificial Sequence: Synthetic peptide
QLDQEWAWIQCEVYGRNCRT

SEQ ID NO: 989 - protein, 20 aa, Artificial Sequence
  Description of Artificial Sequence: Synthetic peptide
TLEQEWAQVICEVYGRGCLS

SEQ ID NO: 990 - protein, 20 aa, Artificial Sequence
  Description of Artificial Sequence: Synthetic peptide
RLEQEWAQVQCEVWGRGCLS

SEQ ID NO: 991 - protein, 20 aa, Artificial Sequence
  Description of Artificial Sequence: Synthetic peptide
WLDQEWALVQCEVYGRGCPA

SEQ ID NO: 992 - protein, 20 aa, Artificial Sequence
  Description of Artificial Sequence: Synthetic peptide
WLDQEWAQIQCHVWGRGCPA

SEQ ID NO: 993 - protein, 20 aa, Artificial Sequence
  Description of Artificial Sequence: Synthetic peptide
WLEQEWAWVQCEVYGRGCPS

SEQ ID NO: 994 - protein, 20 aa, Artificial Sequence
  Description of Artificial Sequence: Synthetic peptide
RLEEEWAWVQCQVYGRGCPS

SEQ ID NO: 995 - protein, 20 aa, Artificial Sequence
  Description of Artificial Sequence: Synthetic peptide
WLEQEWVRIQCEVYGRGCPS

SEQ ID NO: 996 - protein, 20 aa, Artificial Sequence
  Description of Artificial Sequence: Synthetic peptide
WLEQEWTWVQCEVYGCGCPS

SEQ ID NO: 997 - protein, 20 aa, Artificial Sequence
  Description of Artificial Sequence: Synthetic peptide
WLEKEWAGVQCEIYGRGCPS

SEQ ID NO: 998 - protein, 20 aa, Artificial Sequence
  Description of Artificial Sequence: Synthetic peptide
WLEEEWAWVRCEVYGRGCQS

SEQ ID NO: 999 - protein, 20 aa, Artificial Sequence
  Description of Artificial Sequence: Synthetic peptide
WLEHEWAQIQCELYGRGCTY

SEQ ID NO: 1000 - protein, 20 aa, Artificial Sequence
  Description of Artificial Sequence: Synthetic peptide
ALEEEWAWVQCEVYGRGCPS

SEQ ID NO: 1001 - protein, 20 aa, Artificial Sequence
  Description of Artificial Sequence: Synthetic peptide
WLEQEWAQVQCEVYGRGCPS

SEQ ID NO: 1002 - protein, 20 aa, Artificial Sequence
  Description of Artificial Sequence: Synthetic peptide
WLDDEWAQIQCEIYGRGCQS

SEQ ID NO: 1003 - protein, 20 aa, Artificial Sequence
  Description of Artificial Sequence: Synthetic peptide
QLEEEWAGVQCEVYGRECPS

SEQ ID NO: 1004 - protein, 20 aa, Artificial Sequence
  Description of Artificial Sequence: Synthetic peptide
WLEQEWLLVQCGVYGRGCPS

SEQ ID NO: 1005 - protein, 20 aa, Artificial Sequence
  Description of Artificial Sequence: Synthetic peptide
WLDQEWAWIQCEVYGRGCRS

SEQ ID NO: 1006 - protein, 20 aa, Artificial Sequence
  Description of Artificial Sequence: Synthetic peptide
WLEQEWAQVQCEVSGRGCPS

SEQ ID NO: 1007 - protein, 20 aa, Artificial Sequence
  Description of Artificial Sequence: Synthetic peptide
  MOD_RES (2): Unknown amino acid
WXDQEWALIQCEVYGRGCPS

SEQ ID NO: 1008 - protein, 20 aa, Artificial Sequence
  Description of Artificial Sequence: Synthetic peptide
SLDEEWAGVLCEVYGRGCPF

SEQ ID NO: 1009 - protein, 20 aa, Artificial Sequence
  Description of Artificial Sequence: Synthetic peptide
SVDQELEWLMCHFQGRVCPS

SEQ ID NO: 1010 - protein, 20 aa, Artificial Sequence
  Description of Artificial Sequence: Synthetic peptide
WLEQERAWIWCEIQGSGCRA

SEQ ID NO: 1011 - protein, 20 aa, Artificial Sequence
  Description of Artificial Sequence: Synthetic peptide
WVNQALGGVQSDVQGRRCQS

SEQ ID NO: 1012 - protein, 20 aa, Artificial Sequence
  Description of Artificial Sequence: Synthetic peptide
LLDHEWPWVGCEVCGRGSLS

SEQ ID NO: 1013 - protein, 20 aa, Artificial Sequence
  Description of Artificial Sequence: Synthetic peptide
WLHQELAWVRGEGYPRGRRS

SEQ ID NO: 1014 - protein, 20 aa, Artificial Sequence
  Description of Artificial Sequence: Synthetic peptide
WLGHDWAWIQCEVYGLGCPC

SEQ ID NO: 1015 - protein, 20 aa, Artificial Sequence
  Description of Artificial Sequence: Synthetic peptide
  MOD_RES (14): Unknown amino acid; translation read-through at TGA stop codon
WIDQEGVRVQCEAXGRAFPS

SEQ ID NO: 1016 - protein, 20 aa, Artificial Sequence
  Description of Artificial Sequence: Synthetic peptide
WRDEEWAWVQGVVQGRGWPA

SEQ ID NO: 1017 - protein, 20 aa, Artificial Sequence
  Description of Artificial Sequence: Synthetic peptide
RLGVEWSWFQRKVYGRDSTS

SEQ ID NO: 1018 - protein, 20 aa, Artificial Sequence
  Description of Artificial Sequence: Synthetic peptide
WLAQGWAGVQCVVYGRGCRN

SEQ ID NO: 1019 - protein, 20 aa, Artificial Sequence
  Description of Artificial Sequence: Synthetic peptide
  MOD_RES (6): Unknown amino acid; translation read-through at TGA stop codon
  MOD_RES (14): Unknown amino acid
WLEEEXAGIQCQVXGRGCPS

SEQ ID NO: 1020 - protein, 20 aa, Artificial Sequence
  Description of Artificial Sequence: Synthetic peptide
WLDQEWEWVQCEVWGRGCLS

SEQ ID NO: 1021 - protein, 20 aa, Artificial Sequence
  Description of Artificial Sequence: Synthetic peptide
RLEQEWALIQCEVYGRGCPS

SEQ ID NO: 1022 - protein, 20 aa, Artificial Sequence
  Description of Artificial Sequence: Synthetic peptide
WLEEEWAQVQCQVYGRGCAS

SEQ ID NO: 1023 - protein, 20 aa, Artificial Sequence
  Description of Artificial Sequence: Synthetic peptide
  MOD_RES (6): Unknown amino acid; translation read-through at TGA stop codon
WLDLEXEWLQCEVYGRGCAT

SEQ ID NO: 1024 - protein, 20 aa, Artificial Sequence
  Description of Artificial Sequence: Synthetic peptide
WLEQEWVQVRCEVYGRGCPS

SEQ ID NO: 1025 - protein, 20 aa, Artificial Sequence
  Description of Artificial Sequence: Synthetic peptide
WLEEEWAQVQCEVYGRGCPS

SEQ ID NO: 1026 - protein, 20 aa, Artificial Sequence
  Description of Artificial Sequence: Synthetic peptide
WLDQEWARVQCEVWGRGCTY

SEQ ID NO: 1027 - protein, 20 aa, Artificial Sequence
  Description of Artificial Sequence: Synthetic peptide
  MOD_RES (4): Unknown amino acid
YLDXEWAWVQCEVYGLGCQS

SEQ ID NO: 1028 - protein, 20 aa, Artificial Sequence
  Description of Artificial Sequence: Synthetic peptide
  MOD_RES (6): Unknown amino acid; translation read-through at TGA stop codon
WLDVEXAWVQCEVWGRGCPS

SEQ ID NO: 1029 - protein, 20 aa, Artificial Sequence
  Description of Artificial Sequence: Synthetic peptide
  MOD_RES (9): Unknown amino acid
WLEQEWERXQCEVYGRGCPP

SEQ ID NO: 1030 - protein, 20 aa, Artificial Sequence
  Description of Artificial Sequence: Synthetic peptide
WLEEEWAQVQCEVYGRGCLS

SEQ ID NO: 1031 - protein, 20 aa, Artificial Sequence
  Description of Artificial Sequence: Synthetic peptide
WLDQEWAWIQCEVYGRGCPS

SEQ ID NO: 1032 - protein, 20 aa, Artificial Sequence
  Description of Artificial Sequence: Synthetic peptide
  MOD_RES (1): Unknown amino acid
  MOD_RES (14): Unknown amino acid
XLEHEWAQIQCEVXGRGCQS

SEQ ID NO: 1033 - protein, 20 aa, Artificial Sequence
  Description of Artificial Sequence: Synthetic peptide
  MOD_RES (3): Unknown amino acid
WLXQEWAWIQCEVYGRGCPF

SEQ ID NO: 1034 - protein, 20 aa, Artificial Sequence
  Description of Artificial Sequence: Synthetic peptide
  MOD_RES (4): Unknown amino acid
WLDXEWAWVQCEVYGRGCPS

SEQ ID NO: 1035 - protein, 20 aa, Artificial Sequence
  Description of Artificial Sequence: Synthetic peptide
GLEQGCPWVGLEVQCRGCPS

SEQ ID NO: 1036 - protein, 20 aa, Artificial Sequence
  Description of Artificial Sequence: Synthetic peptide
WLEEEWAWVQCEVYGHGCPS

SEQ ID NO: 1037 - protein, 20 aa, Artificial Sequence
  Description of Artificial Sequence: Synthetic peptide
WLDQEWAQIQCEVYGRGCSS

SEQ ID NO: 1038 - protein, 20 aa, Artificial Sequence
  Description of Artificial Sequence: Synthetic peptide
WLDQEWAQVQCEVWGRGCPS

SEQ ID NO: 1039 - protein, 20 aa, Artificial Sequence
  Description of Artificial Sequence: Synthetic peptide
WLDLEWEFVQCEVYGRGCPT

SEQ ID NO: 1040 - protein, 20 aa, Artificial Sequence
  Description of Artificial Sequence: Synthetic peptide
WLEQEWASVQCEVYGRGCPS

SEQ ID NO: 1041 - protein, 20 aa, Artificial Sequence
  Description of Artificial Sequence: Synthetic peptide
WLDLEWEQIKCKVYGRGCPF

SEQ ID NO: 1042 - protein, 20 aa, Artificial Sequence
  Description of Artificial Sequence: Synthetic peptide
WLEQEWAQIQCQIYGRGCPS

SEQ ID NO: 1043 - protein, 20 aa, Artificial Sequence
  Description of Artificial Sequence: Synthetic peptide
WLEQEWALVLCEVYGHGCPA

SEQ ID NO: 1044 - protein, 20 aa, Artificial Sequence
  Description of Artificial Sequence: Synthetic peptide
WLEQEWAQIQCEVWGRGCSS

SEQ ID NO: 1045 - protein, 20 aa, Artificial Sequence
  Description of Artificial Sequence: Synthetic peptide
  MOD_RES (4): Unknown amino acid
  MOD_RES (19): Unknown amino acid
WLEXEWEWVQCEVYGRGCXS

SEQ ID NO: 1046 - protein, 20 aa, Artificial Sequence
  Description of Artificial Sequence: Synthetic peptide
WLEQEWAQVQCDVYGRGCPS

SEQ ID NO: 1047 - protein, 20 aa, Artificial Sequence
  Description of Artificial Sequence: Synthetic peptide
  MOD_RES (6): Unknown amino acid; translation read-through at TGA stop codon
WLEQEXARVQCEVWGRGCPS

SEQ ID NO: 1048 - protein, 20 aa, Artificial Sequence
  Description of Artificial Sequence: Synthetic peptide
  MOD_RES (3): Unknown amino acid
  MOD_RES (18): Unknown amino acid
WLXQEWARVHCEVWGRPXQC

SEQ ID NO: 1049 - protein, 20 aa, Artificial Sequence
  Description of Artificial Sequence: Synthetic peptide
PLEHEWAWVQCVVYGRGCRS

SEQ ID NO: 1050 - protein, 20 aa, Artificial Sequence
  Description of Artificial Sequence: Synthetic peptide
  MOD_RES (4): Unknown amino acid
  MOD_RES (14): Unknown amino acid
  MOD_RES (20): Unknown amino acid
SLEXEWAWVQCEVXGRGCPX

SEQ ID NO: 1051 - protein, 20 aa, Artificial Sequence
  Description of Artificial Sequence: Synthetic peptide
WLDQEWVRVQCEVWGRGCPS

SEQ ID NO: 1052 - protein, 20 aa, Artificial Sequence
  Description of Artificial Sequence: Synthetic peptide
SLDKEWAWVKCEVYGRGCPS

SEQ ID NO: 1053 - protein, 20 aa, Artificial Sequence
  Description of Artificial Sequence: Synthetic peptide
  MOD_RES (14): Unknown amino acid; translation read-through at TAA stop codon
LGDQEWAWVEWEVXGRGWPS

SEQ ID NO: 1054 - protein, 20 aa, Artificial Sequence
  Description of Artificial Sequence: Synthetic peptide
WLEEEWAQIRCGVYGRGCPS

SEQ ID NO: 1055 - protein, 20 aa, Artificial Sequence
  Description of Artificial Sequence: Synthetic peptide
  MOD_RES (6): Unknown amino acid; translation read-through at TGA stop codon
WLEEEXGWVQCEVWGRGCPP

SEQ ID NO: 1056 - protein, 20 aa, Artificial Sequence
  Description of Artificial Sequence: Synthetic peptide
  MOD_RES (8): Unknown amino acid
CLDQEWAXVQCPVYGRGCPS

SEQ ID NO: 1057 - protein, 20 aa, Artificial Sequence
  Description of Artificial Sequence: Synthetic peptide
QLELEWARVQCEVWDRGCPS

SEQ ID NO: 1058 - protein, 20 aa, Artificial Sequence
  Description of Artificial Sequence: Synthetic peptide
RLEQEWAWIQCEVYGRGCRF

SEQ ID NO: 1059 - protein, 20 aa, Artificial Sequence
  Description of Artificial Sequence: Synthetic peptide
  MOD_RES (6): Unknown amino acid; translation read-through at TGA stop codon
  MOD_RES (19): Unknown amino acid
SLEHEXAWVQCKVYGRGCXS

SEQ ID NO: 1060 - protein, 20 aa, Artificial Sequence
  Description of Artificial Sequence: Synthetic peptide
WLDQEWAWIQCEVYGRGCPP

SEQ ID NO: 1061 - protein, 20 aa, Artificial Sequence
  Description of Artificial Sequence: Synthetic peptide
WLDQEWAQVRCEVYGRGCPS

SEQ ID NO: 1062 - protein, 20 aa, Artificial Sequence
  Description of Artificial Sequence: Synthetic peptide
PKGTRFRGDVDVWDGYSWLA

SEQ ID NO: 1063 - protein, 20 aa, Artificial Sequence
  Description of Artificial Sequence: Synthetic peptide
TPIPAGGINIASWGGYTWLS

SEQ ID NO: 1064 - protein, 20 aa, Artificial Sequence
  Description of Artificial Sequence: Synthetic peptide
HRGTVTGVWVARWPGYEWLS

SEQ ID NO: 1065 - protein, 20 aa, Artificial Sequence
  Description of Artificial Sequence: Synthetic peptide
SDVWAQPQRRNDWPGYHWLS

SEQ ID NO: 1066 - protein, 20 aa, Artificial Sequence
  Description of Artificial Sequence: Synthetic peptide
HRGTVTGVWVARWPGYEWLS

SEQ ID NO: 1067 - protein, 20 aa, Artificial Sequence
  Description of Artificial Sequence: Synthetic peptide
SDVWAQPQRRNDWPGYHWLS

SEQ ID NO: 1068 - protein, 20 aa, Artificial Sequence
  Description of Artificial Sequence: Synthetic peptide
RPHRINPQDDAVWPGYLWLG

SEQ ID NO: 1069 - protein, 20 aa, Artificial Sequence
  Description of Artificial Sequence: Synthetic peptide
HRGTVTGVWVARWPGYEWLS

SEQ ID NO: 1070 - protein, 20 aa, Artificial Sequence
  Description of Artificial Sequence: Synthetic peptide
FGRGYGGDGGGYWSGYEWLA

SEQ ID NO: 1071 - protein, 21 aa, Artificial Sequence
  Description of Artificial Sequence: Synthetic peptide
  MOD_RES (20): Unknown amino acid
DGLVVKSGREWPGYGWLERXA

SEQ ID NO: 1072 - protein, 20 aa, Artificial Sequence
  Description of Artificial Sequence: Synthetic peptide
  MOD_RES (6): Unknown amino acid
DGSIVXVSSSVGWPGYEWLM

SEQ ID NO: 1073 - protein, 20 aa, Artificial Sequence
  Description of Artificial Sequence: Synthetic peptide
WQQANLSNGGGRWGGYDWLM

SEQ ID NO: 1074 - protein, 20 aa, Artificial Sequence
  Description of Artificial Sequence: Synthetic peptide
FGRGYGGDGGGYWSGYEWLA

SEQ ID NO: 1075 - protein, 20 aa, Artificial Sequence
  Description of Artificial Sequence: Synthetic peptide
VNYEMDRVPPMPWGGYWWLS

SEQ ID NO: 1076 - protein, 20 aa, Artificial Sequence
  Description of Artificial Sequence: Synthetic peptide
MGGGLWVGVHIWPGYSWLSQ

SEQ ID NO: 1077 - protein, 20 aa, Artificial Sequence
  Description of Artificial Sequence: Synthetic peptide
SDVWAQPQRRNDWPGYHWLS

SEQ ID NO: 1078 - protein, 20 aa, Artificial Sequence
  Description of Artificial Sequence: Synthetic peptide
WPGYLFFEEALQDWRGSTED

SEQ ID NO: 1079 - protein, 20 aa, Artificial Sequence
  Description of Artificial Sequence: Synthetic peptide
SMFVAGSDRWPGYGVLADWL

SEQ ID NO: 1080 - protein, 20 aa, Artificial Sequence
  Description of Artificial Sequence: Synthetic peptide
VRGFQGGTVWPGYEWLRNAA

SEQ ID NO: 1081 - protein, 20 aa, Artificial Sequence
  Description of Artificial Sequence: Synthetic peptide
LDLASGDSWLGYDVLRGWLS

SEQ ID NO: 1082 - protein, 20 aa, Artificial Sequence
  Description of Artificial Sequence: Synthetic peptide
IHSSDGIGAWGGYAWFRDVA

SEQ ID NO: 1083 - protein, 20 aa, Artificial Sequence
  Description of Artificial Sequence: Synthetic peptide
LGPLLRWGSEVCGVWPDLCE

SEQ ID NO: 1084 - protein, 20 aa, Artificial Sequence
  Description of Artificial Sequence: Synthetic peptide
PFGFGGRWWGIPRMWWYRNS

SEQ ID NO: 1085 - protein, 20 aa, Artificial Sequence
  Description of Artificial Sequence: Synthetic peptide
WWWGGRNRWWLERWGLGGER

SEQ ID NO: 1086 - protein, 20 aa, Artificial Sequence
  Description of Artificial Sequence: Synthetic peptide
GRVALWGPVWPRWWFMSRPV

SEQ ID NO: 1087 - protein, 39 aa, Artificial Sequence
  Description of Artificial Sequence: Synthetic peptide
RGTRTDRLWKSGGFAIVPRWPCFSYHCLVEWITKTGSPG

SEQ ID NO: 1088 - protein, 32 aa, Artificial Sequence
  Description of Artificial Sequence: Synthetic peptide
GRTSMAFVPPRHLQPELAPRPVRNHAWLVGGG

SEQ ID NO: 1089 - protein, 20 aa, Artificial Sequence
  Description of Artificial Sequence: Synthetic peptide
CLGAGSFRAGILCLGGLPVS

SEQ ID NO: 1090 - protein, 20 aa, Artificial Sequence
  Description of Artificial Sequence: Synthetic peptide
GFWATACGGLQICEELGLKP

SEQ ID NO: 1091 - protein, 20 aa, Artificial Sequence
  Description of Artificial Sequence: Synthetic peptide
DLFCAYMAQALGLGQDLSCG

SEQ ID NO: 1092 - protein, 19 aa, Artificial Sequence
  Description of Artificial Sequence: Synthetic peptide
  MOD_RES (13): Unknown amino acid; translation read-through at TGA stop codon
RHLLLPQIWIASXGGWGMG

SEQ ID NO: 1093 - protein, 25 aa, Artificial Sequence
  Description of Artificial Sequence: Synthetic peptide
DHRLCGTDEYLMQDLFVRGLCRLIW

SEQ ID NO: 1094 - protein, 25 aa, Artificial Sequence
  Description of Artificial Sequence: Synthetic peptide
GLLFCKQLFTLAGLQPEAGCVSSSR

SEQ ID NO: 1095 - protein, 25 aa, Artificial Sequence
  Description of Artificial Sequence: Synthetic peptide
IWIACLDELLRGQVWSSCRRRAPIG

SEQ ID NO: 1096 - protein, 25 aa, Artificial Sequence
  Description of Artificial Sequence: Synthetic peptide
DWLRCLGVILSGGLTELANTGCVQG

SEQ ID NO: 1097 - protein, 25 aa, Artificial Sequence
  Description of Artificial Sequence: Synthetic peptide
WFSFCLGGLLQAQEWSVWGRDVGCI

SEQ ID NO: 1098 - protein, 25 aa, Artificial Sequence
  Description of Artificial Sequence: Synthetic peptide
GYSWLRDVLMEKQAQLKREGSVGRQ

SEQ ID NO: 1099 - protein, 25 aa, Artificial Sequence
  Description of Artificial Sequence: Synthetic peptide
  MOD_RES (13): Unknown amino acid; translation read-through at TGA stop codon
FLTRLLERLGLSXERGEAGGPYAQA

SEQ ID NO: 1100 - protein, 25 aa, Artificial Sequence
  Description of Artificial Sequence: Synthetic peptide
FSGFCMGLERLSQVSLGYCGAGQGG

SEQ ID NO: 1101 - protein, 25 aa, Artificial Sequence
  Description of Artificial Sequence: Synthetic peptide
ISFRCQLFVLAGMHPCPVDVGGEGF

SEQ ID NO: 1102 - protein, 25 aa, Artificial Sequence
  Description of Artificial Sequence: Synthetic peptide
NTPNCSQDWGQESGFMALLLALTCK

SEQ ID NO: 1103 - protein, 25 aa, Artificial Sequence
  Description of Artificial Sequence: Synthetic peptide
LQGFCELLATVTGVTGLGCLDYQPI

SEQ ID NO: 1104 - protein, 25 aa, Artificial Sequence
  Description of Artificial Sequence: Synthetic peptide
GSSICNLLARAQIVELALCEMGVQE

SEQ ID NO: 1105 - protein, 23 aa, Artificial Sequence
  Description of Artificial Sequence: Synthetic peptide
LSFACLLSQLSGVVLPDCLLGED

SEQ ID NO: 1106 - protein, 25 aa, Artificial Sequence
  Description of Artificial Sequence: Synthetic peptide
GEHFCQLLMSLCGDDCGPVNCGGGS

SEQ ID NO: 1107 - protein, 25 aa, Artificial Sequence
  Description of Artificial Sequence: Synthetic peptide
GWFECLLASLVLQVPQGRSRASAVC

SEQ ID NO: 1108 - protein, 25 aa, Artificial Sequence
  Description of Artificial Sequence: Synthetic peptide
YRQECACSVGAVGFLCGLACLARSG

SEQ ID NO: 1109 - protein, 40 aa, Artificial Sequence
  Description of Artificial Sequence: Synthetic peptide
LSCLAYSRHGIWRPSTDLGLGRSVGEGSVSTRWRGYDWFE

SEQ ID NO: 1110 - protein, 39 aa, Artificial Sequence
  Description of Artificial Sequence: Synthetic peptide
  MOD_RES (19): Unknown amino acid
GLDHSDAVGVHLGFAWPAXARGRWEAGGLEDTWAGYDWL

SEQ ID NO: 1111 - protein, 8 aa, Artificial Sequence
  Description of Artificial Sequence: Synthetic peptide
  MOD_RES (2): Unknown amino acid
WXGYAWLS

SEQ ID NO: 1112 - protein, 40 aa, Artificial Sequence; identical to SEQ ID NO: 1109
  Description of Artificial Sequence: Synthetic peptide

SEQ ID NO: 1113 - protein, 40 aa, Artificial Sequence
  Description of Artificial Sequence: Synthetic peptide
  MOD_RES (31): Unknown amino acid
EAMAVGLQCPARFVRAAAHGDGGSWGQDHVXAWGGYWWLG

SEQ ID NO: 1114 - protein, 20 aa, Artificial Sequence
  Description of Artificial Sequence: Synthetic peptide
HLCVLEELFWGASLFGYCSG

SEQ ID NO: 1115 - protein, 20 aa, Artificial Sequence
  Description of Artificial Sequence: Synthetic peptide
HFYVLVERLSGASLFGSGSA

SEQ ID NO: 1116 - protein, 20 aa, Artificial Sequence
  Description of Artificial Sequence: Synthetic peptide
HRFVREGLLWGAYQFCYCSG

SEQ ID NO: 1117 - protein, 20 aa, Artificial Sequence
  Description of Artificial Sequence: Synthetic peptide
FQSLLEELVWGAPLFRYGTG

SEQ ID NO: 1118 - protein, 20 aa, Artificial Sequence
  Description of Artificial Sequence: Synthetic peptide
HLSVLEELSWGASLFGQWAG

SEQ ID NO: 1119 - protein, 20 aa, Artificial Sequence
  Description of Artificial Sequence: Synthetic peptide
HLSVLEELSWGASLFGQWAG

SEQ ID NO: 1120 - protein, 20 aa, Artificial Sequence
  Description of Artificial Sequence: Synthetic peptide
NLCRLEELAWGASLFGQCAG

SEQ ID NO: 1121 - protein, 20 aa, Artificial Sequence
  Description of Artificial Sequence: Synthetic peptide
APVSTEELRWGALLFGQWAG

SEQ ID NO: 1122 - protein, 20 aa, Artificial Sequence
  Description of Artificial Sequence: Synthetic peptide
HLSVLEERWWRESLFGQWAG

SEQ ID NO: 1123 - protein, 20 aa, Artificial Sequence
  Description of Artificial Sequence: Synthetic peptide
HLSVLEERWWRAALFGQWAG

SEQ ID NO: 1124 - protein, 20 aa, Artificial Sequence
  Description of Artificial Sequence: Synthetic peptide
HLSILEEQWWRESLFGQWAG

SEQ ID NO: 1125 - protein, 19 aa, Artificial Sequence
  Description of Artificial Sequence: Synthetic peptide
HMSVEELSWWASLFGKQAG

SEQ ID NO: 1126 - protein, 20 aa, Artificial Sequence
  Description of Artificial Sequence: Synthetic peptide
HLSELEERWWRATLFGQWAG

SEQ ID NO: 1127 - protein, 20 aa, Artificial Sequence
  Description of Artificial Sequence: Synthetic peptide
HLSVLEELWWRESLFGQWAG

SEQ ID NO: 1128 - protein, 20 aa, Artificial Sequence
  Description of Artificial Sequence: Synthetic peptide
HLSLLEEQWWRESLFGQWAG

SEQ ID NO: 1129 - protein, 20 aa, Artificial Sequence
  Description of Artificial Sequence: Synthetic peptide
HLSVLEERWWRETLFGQWAG

SEQ ID NO: 1130 - protein, 20 aa, Artificial Sequence
  Description of Artificial Sequence: Synthetic peptide
HLSVLEEQWWRESLFGQWAG

SEQ ID NO: 1131 - protein, 20 aa, Artificial Sequence
  Description of Artificial Sequence: Synthetic peptide
  MOD_RES (11): Unknown amino acid
HLSVLEEQWWXESLFGQWAG

SEQ ID NO: 1132 - protein, 20 aa, Artificial Sequence
  Description of Artificial Sequence: Synthetic peptide
HLSVLEELWWREALFGQWAG

SEQ ID NO: 1133 - protein, 20 aa, Artificial Sequence
  Description of Artificial Sequence: Synthetic peptide
HLSVLEERWWRATLFGEWAG

SEQ ID NO: 1134 - protein, 20 aa, Artificial Sequence
  Description of Artificial Sequence: Synthetic peptide
  MOD_RES (3): Unknown amino acid
HLXVLEELLWGVSLFRQWAG

SEQ ID NO: 1135 - protein, 20 aa, Artificial Sequence
  Description of Artificial Sequence: Synthetic peptide
HLSALEEQWWRATLFGQWAG

SEQ ID NO: 1136 - protein, 19 aa, Artificial Sequence
  Description of Artificial Sequence: Synthetic peptide
HLSVLEERWWRATLLESGQ

SEQ ID NO: 1137 - protein, 20 aa, Artificial Sequence
  Description of Artificial Sequence: Synthetic peptide
HLSALEELWWRETLFGQWAG

SEQ ID NO: 1138 - protein, 20 aa, Artificial Sequence
  Description of Artificial Sequence: Synthetic peptide
HLSVLEELWWRESLFGKWAG

SEQ ID NO: 1139 - protein, 20 aa, Artificial Sequence
  Description of Artificial Sequence: Synthetic peptide
HLSVLEEAWWRESLFGHWAG

SEQ ID NO: 1140 - protein, 20 aa, Artificial Sequence
  Description of Artificial Sequence: Synthetic peptide
HMSEQEELWWRATLFGQWAG

SEQ ID NO: 1141 - protein, 20 aa, Artificial Sequence
  Description of Artificial Sequence: Synthetic peptide
HLSVLEERWWRETLFGEWAG

SEQ ID NO: 1142 - protein, 20 aa, Artificial Sequence
  Description of Artificial Sequence: Synthetic peptide
HRSVLKQLSWGASLFGQWAG

SEQ ID NO: 1143 - protein, 20 aa, Artificial Sequence
  Description of Artificial Sequence: Synthetic peptide
  MOD_RES (3): Unknown amino acid; translation read-through at TGA stop codon
HLXVLEELSWGASLVGQWAV

SEQ ID NO: 1144 - protein, 20 aa, Artificial Sequence
  Description of Artificial Sequence: Synthetic peptide
  MOD_RES (9): Unknown amino acid; translation read-through at TGA stop codon
HLSVLEELXLGASMFGLWAG

SEQ ID NO: 1145 - protein, 20 aa, Artificial Sequence
  Description of Artificial Sequence: Synthetic peptide
  MOD_RES (11): Unknown amino acid; translation read-through at TGA stop codon
HLSVLKELSWXASLFGQWAG

SEQ ID NO: 1146 - protein, 20 aa, Artificial Sequence
  Description of Artificial Sequence: Synthetic peptide
HLSALEELSWGASLFGQWAG

SEQ ID NO: 1147 - protein, 20 aa, Artificial Sequence
  Description of Artificial Sequence: Synthetic peptide
  MOD_RES (10): Unknown amino acid; translation read-through at TGA stop codon
HLSVLAELSXGALLFGQWAG

SEQ ID NO: 1148 - protein, 20 aa, Artificial Sequence
  Description of Artificial Sequence: Synthetic peptide
RLSVLEQLSWGASLFGPWAG

SEQ ID NO: 1149 - protein, 20 aa, Artificial Sequence
  Description of Artificial Sequence: Synthetic peptide
  MOD_RES (3): Unknown amino acid; translation read-through at TGA stop codon
HLXVLVQPSWGASLFGQWAG

SEQ ID NO: 1150 - protein, 20 aa, Artificial Sequence
  Description of Artificial Sequence: Synthetic peptide
  MOD_RES (11): Unknown amino acid; translation read-through at TGA stop codon
HQSVLEELSRXASLFGQWAG

SEQ ID NO: 1151 - protein, 20 aa, Artificial Sequence
  Description of Artificial Sequence: Synthetic peptide
  MOD_RES (13): Unknown amino acid; translation read-through at TGA stop codon
DMSVLGGLSWGAXLFGQWSG

SEQ ID NO: 1152 - protein, 20 aa, Artificial Sequence
  Description of Artificial Sequence: Synthetic peptide
HLSVREGQLWRASMFGRWAG

SEQ ID NO: 1153 - protein, 20 aa, Artificial Sequence
  Description of Artificial Sequence: Synthetic peptide
  MOD_RES (9): Unknown amino acid; translation read-through at TGA stop codon
QLSVLVELXWGASLFGPWAA

SEQ ID NO: 1154 - protein, 20 aa, Artificial Sequence
  Description of Artificial Sequence: Synthetic peptide
  MOD_RES (11): Unknown amino acid; translation read-through at TGA stop codon
HLSVGEELSWXVALLGQWAR

SEQ ID NO: 1155 - protein, 24 aa, Artificial Sequence
  Description of Artificial Sequence: Synthetic peptide
KIGGQGQHQDGNFYDWFVEALAKK

SEQ ID NO: 1156 - protein, 23 aa, Artificial Sequence
  Description of Artificial Sequence: Synthetic peptide
KVLQARHGCDSVSDCFYEWFAKK

SEQ ID NO: 1157 - protein, 23 aa, Artificial Sequence
  Description of Artificial Sequence: Synthetic peptide
KWSALLSVMDTGFYAWFDDAVKK

SEQ ID NO: 1158 - protein, 23 aa, Artificial Sequence
  Description of Artificial Sequence: Synthetic peptide
KGHSWALVRHVDRLFYEWFDLKK

SEQ ID NO: 1159 - protein, 23 aa, Artificial Sequence
  Description of Artificial Sequence: Synthetic peptide
KRDKPTDQEEQNWSFYEWFRHKK

SEQ ID NO: 1160 - protein, 24 aa, Artificial Sequence
  Description of Artificial Sequence: Synthetic peptide
KVFWNCRSQQLDFYEWWFEQAAKK

SEQ ID NO: 1161 - protein, 24 aa, Artificial Sequence
  Description of Artificial Sequence: Synthetic peptide
KLESHYVVPQAALDRLFYSWFSKK

SEQ ID NO: 1162 - protein, 23 aa, Artificial Sequence
  Description of Artificial Sequence: Synthetic peptide
KFYGWFSRQLSLTPRDDWGLPKK

SEQ ID NO: 1163 - protein, 23 aa, Artificial Sequence
  Description of Artificial Sequence: Synthetic peptide
KSAPGLVSNKQDGLFYSWFREKK

SEQ ID NO: 1164 - protein, 23 aa, Artificial Sequence
  Description of Artificial Sequence: Synthetic peptide
KRGGGTFYEWFESALRKHGAGKK

SEQ ID NO: 1165 - protein, 23 aa, Artificial Sequence
  Description of Artificial Sequence: Synthetic peptide
KDPERMQSDVGFYEWFRAAVGKK

SEQ ID NO: 1166 - protein, 27 aa, Artificial Sequence
  Description of Artificial Sequence: Synthetic peptide
DYKDCWARPCGDAANFYDWFVQQASKK

SEQ ID NO: 1167 - protein, 27 aa, Artificial Sequence
  Description of Artificial Sequence: Synthetic peptide
DYKDVTFTSAVFHENFYDWFVRQVSKK

SEQ ID NO: 1168 - protein, 12 aa, Artificial Sequence
  Description of Artificial Sequence: Synthetic peptide
SAKNFYDWFVKK

SEQ ID NO: 1169 - protein, 14 aa, Artificial Sequence
  Description of Artificial Sequence: Synthetic peptide
ADKNFYDWFMAAKK

SEQ ID NO: 1170 - protein, 23 aa, Artificial Sequence
  Description of Artificial Sequence: Synthetic peptide
DYKDLCQSWGVRIGWLAGLCPKK

SEQ ID NO: 1171 - protein, 16 aa, Artificial Sequence
  Description of Artificial Sequence: Synthetic peptide
FHENFYDWFVRQVSKK

SEQ ID NO: 1172 - protein, 26 aa, Artificial Sequence
  Description of Artificial Sequence: Synthetic peptide
DYKDFYDAIDQLVRGSARAGGTRDKK

SEQ ID NO: 1173 - protein, 23 aa, Artificial Sequence
  Description of Artificial Sequence: Synthetic peptide
KDRAFYNGLRDLVGAVYGAWDKK

SEQ ID NO: 1174 - protein, 23 aa, Artificial Sequence
  Description of Artificial Sequence: Synthetic peptide
KVRGFQGGTVWPGYEWLRNAAKK

SEQ ID NO: 1175 - protein, 23 aa, Artificial Sequence
  Description of Artificial Sequence: Synthetic peptide
KSMFVAGSDRWPGYGVLADWLKK

SEQ ID NO: 1176 - protein, 23 aa, Artificial Sequence
  Description of Artificial Sequence: Synthetic peptide
KEIEAEWGRVRCLVYGRCVGGKK

SEQ ID NO: 1177 - protein, 23 aa, Artificial Sequence
  Description of Artificial Sequence: Synthetic peptide
KWLDQEWAWVQCEVYGRGCPSKK

SEQ ID NO: 1178 - protein, 23 aa, Artificial Sequence
  Description of Artificial Sequence: Synthetic peptide
KHLCVLEELFWGASLFGYCSGKK

SEQ ID NO: 1179 - protein, 26 aa, Artificial Sequence
  Description of Artificial Sequence: Synthetic peptide
DYKDERSAAGFRGNFYDWFVAQVNKK

SEQ ID NO: 1180 - protein, 16 aa, Artificial Sequence
  Description of Artificial Sequence: Synthetic peptide
LGENFYDWFVMQVRKK

SEQ ID NO: 1181 - protein, 26 aa, Artificial Sequence
  Description of Artificial Sequence: Synthetic peptide
DYKDFYDAIDQLVRGSARAGGTRDKK

SEQ ID NO: 1182 - protein, 27 aa, Artificial Sequence
  Description of Artificial Sequence: Synthetic peptide
DYKDCWARPCGDAANFYDWFVQQASKK

SEQ ID NO: 1183 - protein, 23 aa, Artificial Sequence
  Description of Artificial Sequence: Synthetic peptide
KWLDQEWAWVQCEVYGRGCPSKK

SEQ ID NO: 1184 - protein, 19 aa, Artificial Sequence
  Description of Artificial Sequence: Synthetic peptide
KRGFQGGTVWPGYEWLRNA

SEQ ID NO: 1185 - protein, 23 aa, Artificial Sequence
  Description of Artificial Sequence: Synthetic peptide
KHLCVLEELFWGASLFGYCSGKK

SEQ ID NO: 1186 - protein, 16 aa, Artificial Sequence
  Description of Artificial Sequence: Synthetic peptide
FHENFYDWFVRQVSKK

SEQ ID NO: 1187 - protein, 20 aa, Artificial Sequence
  Description of Artificial Sequence: Synthetic peptide
RLYYEWFWGQLEAQGRGGLS

SEQ ID NO: 1188 - protein, 20 aa, Artificial Sequence
  Description of Artificial Sequence: Synthetic peptide
GLEQGCPWVGLEVQCRGCPS

SEQ ID NO: 1189 - protein, 20 aa, Artificial Sequence
  Description of Artificial Sequence: Synthetic peptide
FYCGLEELSWGAALFGYCSG

SEQ ID NO: 1190 - protein, 20 aa, Artificial Sequence
  Description of Artificial Sequence: Synthetic peptide
GNGDGMFYQLLSLLVGRDMH

SEQ ID NO: 1191 - protein, 26 aa, Artificial Sequence
  Description of Artificial Sequence: Synthetic peptide
GIISQSCPESFYDWFAGQVSDPWWCW

SEQ ID NO: 1192 - protein, 21 aa, Artificial Sequence
  Description of Artificial Sequence: Synthetic peptide
VEGRGLFYDLLRQLLARRQNG

SEQ ID NO: 1193 - protein, 19 aa, Artificial Sequence
  Description of Artificial Sequence: Synthetic peptide
RAMSFYDALVSVLGLGPKK

SEQ ID NO: 1194 - protein, 20 aa, Artificial Sequence
  Description of Artificial Sequence: Synthetic peptide
GSRPVFHEQFYEWFVDQLGL

SEQ ID NO: 1195 - protein, 20 aa, Artificial Sequence
  Description of Artificial Sequence: Synthetic peptide
RSEASFHVEFYSWFEEQLRS

SEQ ID NO: 1196 - protein, 20 aa, Artificial Sequence
  Description of Artificial Sequence: Synthetic peptide
GRFYGWFQDAIDQLMPWGFD

SEQ ID NO: 1197 - protein, 19 aa, Artificial Sequence
  Description of Artificial Sequence: Synthetic peptide
PPWGARFYDAIEQLVFDNL

SEQ ID NO: 1198 - protein, 23 aa, Artificial Sequence
  Description of Artificial Sequence: Synthetic peptide
AGVNAGFYRYFSTLLDWWDQGKK

SEQ ID NO: 1199 - protein, 27 aa, Artificial Sequence
  Description of Artificial Sequence: Synthetic peptide
TFYSCLASLLTGTPQPNRGPWERCRKK

SEQ ID NO: 1200 - protein, 17 aa, Artificial Sequence
  Description of Artificial Sequence: Synthetic peptide
AAVHEQFYDWFADQYKK

SEQ ID NO: 1201 - protein, 17 aa, Artificial Sequence
  Description of Artificial Sequence: Synthetic peptide
QSFYDYIEELLGGEWKK

SEQ ID NO: 1202 - protein, 17 aa, Artificial Sequence
  Description of Artificial Sequence: Synthetic peptide
QSFYDYIEELLGGEWEE

SEQ ID NO: 1203 - protein, 18 aa, Artificial Sequence
  Description of Artificial Sequence: Synthetic peptide
GSLDESFYDWFERQLGKK

SEQ ID NO: 1204 - protein, 18 aa, Artificial Sequence
  Description of Artificial Sequence: Synthetic peptide
GSFYEALQRLVGGEQGKK

SEQ ID NO: 1205 - protein, 17 aa, Artificial Sequence
  Description of Artificial Sequence: Synthetic peptide
QAPSNFYDWFVREWDKK

SEQ ID NO: 1206 - protein, 17 aa, Artificial Sequence
  Description of Artificial Sequence: Synthetic peptide
DPFYQGLWEWLRESGKK

SEQ ID NO: 1207 - protein, 20 aa, Artificial Sequence
  Description of Artificial Sequence: Synthetic peptide
ASGFPENFYDWFGRQLSLKK

SEQ ID NO: 1208 - protein, 20 aa, Artificial Sequence
  Description of Artificial Sequence: Synthetic peptide
SACQFDCHENFYDWFARQKK

SEQ ID NO: 1209 - protein, 20 aa, Artificial Sequence
  Description of Artificial Sequence: Synthetic peptide
SQAGSAFYAWFDQVLRTVKK

SEQ ID NO: 1210 - protein, 20 aa, Artificial Sequence
  Description of Artificial Sequence: Synthetic peptide
VMDARDDPFYHKLSELVTKK

SEQ ID NO: 1211 - protein, 20 aa, Artificial Sequence
  Description of Artificial Sequence: Synthetic peptide
QSDAFYSGLWALIGLSDGKK

SEQ ID NO: 1212 - protein, 19 aa, Artificial Sequence
  Description of Artificial Sequence: Synthetic peptide
LQPCSGFYECIERLIGVKK

SEQ ID NO: 1213 - protein, 19 aa, Artificial Sequence
  Description of Artificial Sequence: Synthetic peptide
LKDGFYDYFWQRLHLGSKK

SEQ ID NO: 1214 - protein, 19 aa, Artificial Sequence
  Description of Artificial Sequence: Synthetic peptide
GSASFYDAIDRLLRMRIKK

SEQ ID NO: 1215 - protein, 20 aa, Artificial Sequence
  Description of Artificial Sequence: Synthetic peptide
WPGYLFFEEALQDWRGSTED

SEQ ID NO: 1216 - protein, 9 aa, Artificial Sequence
  Description of Artificial Sequence: Synthetic peptide
AFYDWFAKK

SEQ ID NO: 1217 - protein, 17 aa, Artificial Sequence
  Description of Artificial Sequence: Synthetic peptide
LDALDRLMRYFEERPSL

SEQ ID NO: 1218 - protein, 20 aa, Artificial Sequence
  Description of Artificial Sequence: Synthetic peptide
PLAELWAYFEHSEQGRSSAH

SEQ ID NO: 1219 - protein, 21 aa, Artificial Sequence
  Description of Artificial Sequence: Synthetic peptide
GRVDWLQRNANFYDWFVAELG

SEQ ID NO: 1220 - protein, 21 aa, Artificial Sequence
  Description of Artificial Sequence: Synthetic peptide
NGVERAGTGDNFYDWFVAQLH

SEQ ID NO: 1221 - protein, 21 aa, Artificial Sequence
  Description of Artificial Sequence: Synthetic peptide
IGGQGQHQDGNFYDWFVEALA

SEQ ID NO: 1222 - protein, 20 aa, Artificial Sequence
  Description of Artificial Sequence: Synthetic peptide
VFWNCRSQQLDFYEWFEQAA

SEQ ID NO: 1223 - protein, 20 aa, Artificial Sequence
  Description of Artificial Sequence: Synthetic peptide
RGGGTFYEWFESALRKHGAG

SEQ ID NO: 1224 - protein, 26 aa, Artificial Sequence
  Description of Artificial Sequence: Synthetic peptide
RVAGAISAPGLVSNKQDGLFYSWFRE

SEQ ID NO: 1225 - protein, 20 aa, Artificial Sequence
  Description of Artificial Sequence: Synthetic peptide
VLQARHGCDSVSDCFYEWFA

SEQ ID NO: 1226 - protein, 20 aa, Artificial Sequence
  Description of Artificial Sequence: Synthetic peptide
DPERMQSDVGFYEWFRAAVG

SEQ ID NO: 1227 - protein, 20 aa, Artificial Sequence
  Description of Artificial Sequence: Synthetic peptide
WSALLSVMDTGFYAWFDDAV

SEQ ID NO: 1228 - protein, 20 aa, Artificial Sequence
  Description of Artificial Sequence: Synthetic peptide
DIGSDGHGRRWDSFYRWFEM

SEQ ID NO: 1229 - protein, 16 aa, Artificial Sequence
  Description of Artificial Sequence: Synthetic peptide
IGGSFVEFYGWFNDQV

SEQ ID NO: 1230 - protein, 20 aa, Artificial Sequence
  Description of Artificial Sequence: Synthetic peptide
GHSWALVRHVDRLFYEWFDL

SEQ ID NO: 1231 - protein, 20 aa, Artificial Sequence
  Description of Artificial Sequence: Synthetic peptide
LPAGGAQGFAVRGFYEWFES

SEQ ID NO: 1232 - protein, 20 aa, Artificial Sequence
  Description of Artificial Sequence: Synthetic peptide
RDKPTDQEEQNWSFYEWFRH

SEQ ID NO: 1233 - protein, 20 aa, Artificial Sequence
  Description of Artificial Sequence: Synthetic peptide
SRDQTNFTFNSAGFYGWFER

SEQ ID NO: 1234 - protein, 20 aa, Artificial Sequence
  Description of Artificial Sequence: Synthetic peptide
GAFYRWFHEALVGSERVPDV

SEQ ID NO: 1235 - protein, 20 aa, Artificial Sequence
  Description of Artificial Sequence: Synthetic peptide
RIGGGWARSEGFYEWFVREL

SEQ ID NO: 1236 - protein, 20 aa, Artificial Sequence
  Description of Artificial Sequence: Synthetic peptide
RMFYEWFWSQMGAGPTEGSA

SEQ ID NO: 1237 - protein, 20 aa, Artificial Sequence
  Description of Artificial Sequence: Synthetic peptide
HEAFYDWFSALVDGGYELMG

SEQ ID NO: 1238 - protein, 20 aa, Artificial Sequence
  Description of Artificial Sequence: Synthetic peptide
FYGWFSRQLSLTPRDDWGLP

SEQ ID NO: 1239 - protein, 17 aa, Artificial Sequence
  Description of Artificial Sequence: Synthetic peptide
GVGTLTMSSDAFYTWFV

SEQ ID NO: 1240 - protein, 20 aa, Artificial Sequence
  Description of Artificial Sequence: Synthetic peptide
LGTSAGQGVGHRAFYQWFQS

SEQ ID NO: 1241 - protein, 23 aa, Artificial Sequence
  Description of Artificial Sequence: Synthetic peptide
ETLESHYVVPQAALDRLFYSWFS

SEQ ID NO: 1242 - protein, 40 aa, Artificial Sequence; identical to SEQ ID NO: 1
  Description of Artificial Sequence: Synthetic peptide

SEQ ID NO: 1243 - protein, 40 aa, Artificial Sequence; identical to SEQ ID NO: 2
  Description of Artificial Sequence: Synthetic peptide

SEQ ID NO: 1244 - protein, 20 aa, Artificial Sequence
  Description of Artificial Sequence: Synthetic peptide
EIEAEWGRVRCLVYGRCVGG

SEQ ID NO: 1245 - protein, 20 aa, Artificial Sequence
  Description of Artificial Sequence: Synthetic peptide
WLDQEWAWVQCEVYGRGCPS

SEQ ID NO: 1246 - protein, 24 aa, Artificial Sequence
  Description of Artificial Sequence: Synthetic peptide
DYKDFYDAIDQLVRGSARAGGTRD

SEQ ID NO: 1247 - protein, 24 aa, Artificial Sequence
  Description of Artificial Sequence: Synthetic peptide
DYKDDRAFYNGLRDLVGAVYGAWD

SEQ ID NO: 1248 - protein, 24 aa, Artificial Sequence
  Description of Artificial Sequence: Synthetic peptide
DYKDRLFYCGIQALGANLGYSGCV

SEQ ID NO: 1249 - protein, 19 aa, Artificial Sequence
  Description of Artificial Sequence: Synthetic peptide
DYKDFYSALWGLCGVTGCG

SEQ ID NO: 1250 - protein, 20 aa, Artificial Sequence
  Description of Artificial Sequence: Synthetic peptide
RGQSDAFYSGLWALIGLSDG

SEQ ID NO: 1251 - protein, 41 aa, Artificial Sequence
  Description of Artificial Sequence: Synthetic peptide
RYFPFGGFYGNLDVLRWLRPYVASPRWGHWRPGGSLGKQPT

SEQ ID NO: 1252 - protein, 20 aa, Artificial Sequence
  Description of Artificial Sequence: Synthetic peptide
PFGFGGRWWGIPRMWWYRNS

SEQ ID NO: 1253 - protein, 20 aa, Artificial Sequence
  Description of Artificial Sequence: Synthetic peptide
WWWGGRNRWWLERWGLGGER

SEQ ID NO: 1254 - protein, 20 aa, Artificial Sequence
  Description of Artificial Sequence: Synthetic peptide
LGPLLRWGSEVCGVWPDLCE

SEQ ID NO: 1255 - protein, 20 aa, Artificial Sequence
  Description of Artificial Sequence: Synthetic peptide
GRVALWGPVWPRWWFMSRPV

SEQ ID NO: 1256 - protein, 20 aa, Artificial Sequence
  Description of Artificial Sequence: Synthetic peptide
SMFVAGSDRWPGYGVLADWL

SEQ ID NO: 1257 - protein, 20 aa, Artificial Sequence
  Description of Artificial Sequence: Synthetic peptide
VRGFQGGTVWPGYEWLRNAA

SEQ ID NO: 1258 - protein, 20 aa, Artificial Sequence
  Description of Artificial Sequence: Synthetic peptide
WPGYLFFEEALQDWRGSTED

SEQ ID NO: 1259 - protein, 20 aa, Artificial Sequence
  Description of Artificial Sequence: Synthetic peptide
ACSSFFVKGPEGFLQCLGSI

SEQ ID NO: 1260 - protein, 20 aa, Artificial Sequence
  Description of Artificial Sequence: Synthetic peptide
HLCVLEELFWGASLFGYCSG

SEQ ID NO: 1261 - protein, 36 aa, Artificial Sequence
  Description of Artificial Sequence: Synthetic peptide
PERGRGLRTAMQLMRRPRDWHFPHSLFWGAPPPLSG

SEQ ID NO: 1262 - protein, 36 aa, Artificial Sequence
  Description of Artificial Sequence: Synthetic peptide
PAMAVGYPQPCAKSTYERGRGSALESRCYQAAAGAP

SEQ ID NO: 1263 - protein, 36 aa, Artificial Sequence
  Description of Artificial Sequence: Synthetic peptide
  MOD_RES (9): Unknown amino acid; translation read-through at TGA stop codon
PAMACKVCXCCSVSCYDGFPRSGAHPGRRWAAAGAP

SEQ ID NO: 1264 - protein, 36 aa, Artificial Sequence
  Description of Artificial Sequence: Synthetic peptide
PAMAFKVSLSCGESFYEWFAGLVRDPTCGWTAAGAP

SEQ ID NO: 1265 - protein, 33 aa, Artificial Sequence
  Description of Artificial Sequence: Synthetic peptide
  MOD_RES (14): Unknown amino acid; translation read-through at TGA stop codon
AGHGACEFQVMFGXLVHLLGFPGRLGKGLAAGA

SEQ ID NO: 1266 - protein, 36 aa, Artificial Sequence
  Description of Artificial Sequence: Synthetic peptide
  MOD_RES (29): Unknown amino acid; translation read-through at TGA stop codon
RPWRGSWLRLVGRRVECYCAERGATRGWXCAAAGAP

SEQ ID NO: 1267 - protein, 36 aa, Artificial Sequence
  Description of Artificial Sequence: Synthetic peptide
AGHGDFGALSCKAAVVAWVPVQTAGLRVRVAAAGAP

SEQ ID NO: 1268 - protein, 36 aa, Artificial Sequence
  Description of Artificial Sequence: Synthetic peptide
PAMAPRLYQGCPESFYAWTAGHVSPALYGWAAAGAP

SEQ ID NO: 1269 - protein, 36 aa, Artificial Sequence
  Description of Artificial Sequence: Synthetic peptide
  MOD_RES (22): Unknown amino acid; translation read-through at TAA stop codon
PGHGVSVRAGVSGMLRREVAGXCVSAWEGLCGRRCA

SEQ ID NO: 1270 - protein, 36 aa, Artificial Sequence
  Description of Artificial Sequence: Synthetic peptide
  MOD_RES (10): Unknown amino acid; translation read-through at TAA stop codon
  MOD_RES (24): Unknown amino acid; translation read-through at TAA stop codon
  MOD_RES (30): Unknown amino acid; translation read-through at TAA stop codon
PAMAGMDPQXCTVASSRWFASPVXVVWRCXAAAGAP

SEQ ID NO: 1271 - protein, 36 aa, Artificial Sequence
  Description of Artificial Sequence: Synthetic peptide
PAMAGMFSQTCPEGFYGWFAGQASDSSLCRAAAGAP

SEQ ID NO: 1272 - protein, 36 aa, Artificial Sequence
  Description of Artificial Sequence: Synthetic peptide
  MOD_RES (16): Unknown amino acid; translation read-through at TGA stop codon
  MOD_RES (27): Unknown amino acid; translation read-through at TAA stop codon
PAMAPLGFRSCAGAYXVGCGRRVAFEXRCWAAAGAP

SEQ ID NO: 1273 - protein, 36 aa, Artificial Sequence
  Description of Artificial Sequence: Synthetic peptide
  MOD_RES (19): Unknown amino acid; translation read-through at TAA stop codon
PAMAGILCPSCPHFLVDSXAAQDAAGQWPSAAAGAP

SEQ ID NO: 1274 - protein, 36 aa, Artificial Sequence
  Description of Artificial Sequence: Synthetic peptide
PAMARRIPRECGDSFYVGLRWLVENPRSDWAAAGAP

SEQ ID NO: 1275 - protein, 36 aa, Artificial Sequence
  Description of Artificial Sequence: Synthetic peptide
PAMADRIGVQCPDSFYGWFAVQEPGTSGGLAAAGAP

SEQ ID NO: 1276 - protein, 31 aa, Artificial Sequence
  Description of Artificial Sequence: Synthetic peptide
  MOD_RES (9): Unknown amino acid; translation read-through at TGA stop codon
PAMAGLPSXSCRVAMYKGQAAWSCSAAAGAP

SEQ ID NO: 1277 - protein, 35 aa, Artificial Sequence
  Description of Artificial Sequence: Synthetic peptide
RPWRLILVTLVREASMTGSGVWYPRRGGAGPAEGA

SEQ ID NO: 1278 - protein, 36 aa, Artificial Sequence
  Description of Artificial Sequence: Synthetic peptide
  MOD_RES (22): Unknown amino acid; translation read-through at TGA stop codon
  MOD_RES (29): Unknown amino acid; translation read-through at TAA stop codon
PAMAGSARQVCVDGVVGWREGXVVDQWLXRAAAGAP

SEQ ID NO: 1279 - protein, 36 aa, Artificial Sequence
  Description of Artificial Sequence: Synthetic peptide
PAMAGIMQRACEGGFTDCLWSLISGASSGRAAAGAP

SEQ ID NO: 1280 - protein, 36 aa, Artificial Sequence
  Description of Artificial Sequence: Synthetic peptide
RPWRVSSLRHVRVTCGELFGGQVSELFCLCAAAGAP

SEQ ID NO: 1281 - protein, 36 aa, Artificial Sequence
  Description of Artificial Sequence: Synthetic peptide
  MOD_RES (28): Unknown amino acid; translation read-through at TAA stop codon
PAMAGLIYMSCLAYFDDLIERRLEKPGXRFAAAGAP

SEQ ID NO: 1282 - protein, 36 aa, Artificial Sequence
  Description of Artificial Sequence: Synthetic peptide
PAMAGIMPQSCGETSGKCMRGQVSLRWRWSAAAGAP

SEQ ID NO: 1283 - protein, 36 aa, Artificial Sequence
  Description of Artificial Sequence: Synthetic peptide
PAMAFILPRSCEDYLYDFLASKVVHVFRSLAAAGAP

SEQ ID NO: 1284 - protein, 35 aa, Artificial Sequence
  Description of Artificial Sequence: Synthetic peptide
PAMACMSSQPCGESFYDWFAGQVRDPGWESAAAGA

SEQ ID NO: 1285 - protein, 35 aa, Artificial Sequence
  Description of Artificial Sequence: Synthetic peptide
  MOD_RES (16): Unknown amino acid; translation read-through at TGA stop codon
  MOD_RES (30): Unknown amino acid; translation read-through at TAA stop codon
RPWRGWAIRGVRHRCXGAWRGQVAQELCRXAAAGA

SEQ ID NO: 1286 - protein, 36 aa, Artificial Sequence
  Description of Artificial Sequence: Synthetic peptide
PAMAGIASHTCPGGFYEWFACQSRAPGWDGAAAGAP

SEQ ID NO: 1287 - protein, 36 aa, Artificial Sequence
  Description of Artificial Sequence: Synthetic peptide
PAMAGRIARACPDSMFGWLAGQGSQQSGWQAAAGAP

SEQ ID NO: 1288 - protein, 36 aa, Artificial Sequence
  Description of Artificial Sequence: Synthetic peptide
  MOD_RES (12): Unknown amino acid; translation read-through at TAA stop codon
PAMARPISPLCXRRSKDEDASRVSLPGFFCAAAGAP

SEQ ID NO: 1289 - protein, 43 aa, Artificial Sequence
  Description of Artificial Sequence: Synthetic peptide
PAMADYKDDDDKTFYACLASLMAGTPRQYRTPWARCPAAAGAP

SEQ ID NO: 1290 - protein, 36 aa, Artificial Sequence
  Description of Artificial Sequence: Synthetic peptide
  MOD_RES (13): Unknown amino acid; translation read-through at TAA stop codon
  MOD_RES (29): Unknown amino acid; translation read-through at TGA stop codon
RPWRVNTSESCLXFVCSLFSGYECWVGGXWAAAGAP

SEQ ID NO: 1291 - protein, 36 aa, Artificial Sequence
  Description of Artificial Sequence: Synthetic peptide
PAMAGMGVQSCHDSFYGWFGCLFSDAEGDRAAAGAP

SEQ ID NO: 1292 - protein, 36 aa, Artificial Sequence
  Description of Artificial Sequence: Synthetic peptide
  MOD_RES (18): Unknown amino acid
PAMAGDTSRACPESLNGXFCVVGVALRRWIAAAGAP

SEQ ID NO: 1293 - protein, 36 aa, Artificial Sequence
  Description of Artificial Sequence: Synthetic peptide
PAMARWWRGLCGERWYHRGWVQVQFPWERGAAAGAP

SEQ ID NO: 1294 - protein, 34 aa, Artificial Sequence
  Description of Artificial Sequence: Synthetic peptide
RPWRVPWVLEMPEYGNANLVFYDALQRLAAAGAP

SEQ ID NO: 1295 - protein, 36 aa, Artificial Sequence
  Description of Artificial Sequence: Synthetic peptide
AGHGVCYLAGVFGEALGGGRVSGFAIGQVRAAAGAP

SEQ ID NO: 1296 - protein, 36 aa, Artificial Sequence
  Description of Artificial Sequence: Synthetic peptide
PAMAGRIKEFCSRSFYDQVACLVKGPSWGGAAAGAP

SEQ ID NO: 1297 - protein, 36 aa, Artificial Sequence; identical to SEQ ID NO: 1296
  Description of Artificial Sequence: Synthetic peptide

SEQ ID NO: 1298 - protein, 36 aa, Artificial Sequence
  Description of Artificial Sequence: Synthetic peptide
PAMAGISSRSCAENLRFGRAWQGSDVWDCLAAAGAP

SEQ ID NO: 1299 - protein, 36 aa, Artificial Sequence
  Description of Artificial Sequence: Synthetic peptide
PAMASRIPQWCRDSFYEWFECQLLGPRESRAAAGAP

SEQ ID NO: 1300 - protein, 36 aa, Artificial Sequence
  Description of Artificial Sequence: Synthetic peptide
PAMAGAESCYRAKSFYDGLGCLVGEAWWGGAAAGAP

SEQ ID NO: 1301 - protein, 36 aa, Artificial Sequence
  Description of Artificial Sequence: Synthetic peptide
PAMARSGAPRCHDPFYEWFAVEAQEPLRCEAAAGAP

SEQ ID NO: 1302 - protein, 36 aa, Artificial Sequence; identical to SEQ ID NO: 1291
  Description of Artificial Sequence: Synthetic peptide

SEQ ID NO: 1303 - protein, 36 aa, Artificial Sequence
  Description of Artificial Sequence: Synthetic peptide
PAMADISFESCLAQLLGWRAGEGSKRLWRCAAAGAP

SEQ ID NO: 1304 - protein, 36 aa, Artificial Sequence
  Description of Artificial Sequence: Synthetic peptide
PAMANTFLYPCRDPFYHSLADLVGVAMQCGAAAGAP

SEQ ID NO: 1305 - protein, 36 aa, Artificial Sequence
  Description of Artificial Sequence: Synthetic peptide
PAMARRIPRECGDSFYAGLRCLVESPRSDWAAAGAP

SEQ ID NO: 1306 - protein, 36 aa, Artificial Sequence
  Description of Artificial Sequence: Synthetic peptide
PAMASIVCPFCEDSFYNWFAAQVADTRGLWAAAGAP

SEQ ID NO: 1307 - protein, 36 aa, Artificial Sequence
  Description of Artificial Sequence: Synthetic peptide
PAMAWSHSHAYTESYYDWFAAQVLSAGSGRAAAGAP

SEQ ID NO: 1308 - protein, 36 aa, Artificial Sequence; identical to SEQ ID NO: 1296
  Description of Artificial Sequence: Synthetic peptide

SEQ ID NO: 1309 - protein, 36 aa, Artificial Sequence
  Description of Artificial Sequence: Synthetic peptide
PAMARSRPPACGDSFYGWFECEVSGLGRRGAAAGAP

SEQ ID NO: 1310 - protein, 36 aa, Artificial Sequence
  Description of Artificial Sequence: Synthetic peptide
PAMAGISYPACEESFYDCLASLVLSPWGSGAAAGAP

SEQ ID NO: 1311 - protein, 36 aa, Artificial Sequence; identical to SEQ ID NO: 1296
  Description of Artificial Sequence: Synthetic peptide

SEQ ID NO: 1312 - protein, 36 aa, Artificial Sequence
  Description of Artificial Sequence: Synthetic peptide
PAMAVVAGQYCRDSFYDRLSALVGDAWRCGAAAGAP

SEQ ID NO: 1313 - protein, 36 aa, Artificial Sequence
  Description of Artificial Sequence: Synthetic peptide
PAMACTASRFCAVSFYEWFAAQLPDLGGDSAAAGAP

SEQ ID NO: 1314 - protein, 36 aa, Artificial Sequence
  Description of Artificial Sequence: Synthetic peptide
PAMAGITLQSCGGGFYELLASVVGDTGCRLAAAGAP

SEQ ID NO: 1315 - protein, 36 aa, Artificial Sequence
  Description of Artificial Sequence: Synthetic peptide
PAMAGYICRSCQGSFYGCLAALVRDPRCSRAAAGAP

SEQ ID NO: 1316 - protein, 36 aa, Artificial Sequence; identical to SEQ ID NO: 1296
  Description of Artificial Sequence: Synthetic peptide

SEQ ID NO: 1317 - protein, 36 aa, Artificial Sequence
  Description of Artificial Sequence: Synthetic peptide
RPWRVAGAPRCHDPFYEWFAVEAQEPLRCEAAAGAP

SEQ ID NO: 1318 - protein, 36 aa, Artificial Sequence; identical to SEQ ID NO: 1291
  Description of Artificial Sequence: Synthetic peptide

SEQ ID NO: 1319 - protein, 36 aa, Artificial Sequence
  Description of Artificial Sequence: Synthetic peptide
PAMASICGQSCRDPFYAGLRGLLLEPLQLGAAAGAP

SEQ ID NO: 1320 - protein, 36 aa, Artificial Sequence
  Description of Artificial Sequence: Synthetic peptide
PAMAGVMSKCCSGSFYDWLADLVPEASWSWAAAGAP

SEQ ID NO: 1321 - protein, 36 aa, Artificial Sequence
  Description of Artificial Sequence: Synthetic peptide
PAMASFSGEACGGSFYDCLAGLMRDSSVSRAAAGAP

SEQ ID NO: 1322 - protein, 36 aa, Artificial Sequence
  Description of Artificial Sequence: Synthetic peptide
PAMASFSFYTCMETLLDGFGGQAFNRCRRTAAAGAP

SEQ ID NO: 1323 - protein, 36 aa, Artificial Sequence
  Description of Artificial Sequence: Synthetic peptide
PAMARVIYPTCPRDFYGGLAALVFGPHVCGAAAGAP

SEQ ID NO: 1324 - protein, 36 aa, Artificial Sequence
  Description of Artificial Sequence: Synthetic peptide
PAMAGIGSQACTDPFYYWFEGLVSNGGWCRAAAGAP

SEQ ID NO: 1325 - protein, 36 aa, Artificial Sequence; identical to SEQ ID NO: 1296
  Description of Artificial Sequence: Synthetic peptide

SEQ ID NO: 1326 - protein, 36 aa, Artificial Sequence; identical to SEQ ID NO: 1300
  Description of Artificial Sequence: Synthetic peptide

SEQ ID NO: 1327 - protein, 36 aa, Artificial Sequence
  Description of Artificial Sequence: Synthetic peptide
PAMADMMSQVCSQSMTGRFSVDFYDGLRCLAAAGAP

SEQ ID NO: 1328 - protein, 36 aa, Artificial Sequence; identical to SEQ ID NO: 1305
  Description of Artificial Sequence: Synthetic peptide

SEQ ID NO: 1329 - protein, 36 aa, Artificial Sequence
  Description of Artificial Sequence: Synthetic peptide
PAMARVIQEACGGSFYDGLACLVYPQGWRGAAAGAP

SEQ ID NO: 1330 - protein, 36 aa, Artificial Sequence
  Description of Artificial Sequence: Synthetic peptide
PAMAGGRSVACQESFYALLGCVVMGPGGGSAAAGAP

SEQ ID NO: 1331 - protein, 36 aa, Artificial Sequence
  Description of Artificial Sequence: Synthetic peptide
PAMAGISFRSCLQALIAGSAGNASEMGCRSAAAGAP

SEQ ID NO: 1332 - protein, 36 aa, Artificial Sequence
  Description of Artificial Sequence: Synthetic peptide
PAMAGIRDSYCQGAFYDWFAGLVDDGLFCQAAAGAP

SEQ ID NO: 1333 - protein, 36 aa, Artificial Sequence
  Description of Artificial Sequence: Synthetic peptide
PAMAGISYQSCEDSFYAWFACTVLDTRGGGAAAGAP

SEQ ID NO: 1334 - protein, 36 aa, Artificial Sequence
  Description of Artificial Sequence: Synthetic peptide
PAMARVIYEACGGSFYDGLACLVYPQGWRGAAAGAP

SEQ ID NO: 1335 - protein, 36 aa, Artificial Sequence
  Description of Artificial Sequence: Synthetic peptide
PAMADMPLLECLDPFYSWFAGQVSDPRFCGAAAGAP

SEQ ID NO: 1336 - protein, 36 aa, Artificial Sequence; identical to SEQ ID NO: 1329
  Description of Artificial Sequence: Synthetic peptide

SEQ ID NO: 1337 - protein, 36 aa, Artificial Sequence; identical to SEQ ID NO: 1296
  Description of Artificial Sequence: Synthetic peptide

SEQ ID NO: 1338 - protein, 36 aa, Artificial Sequence
  Description of Artificial Sequence: Synthetic peptide
PAMAHISFHSCLEALQDPEWGQPSAAWRNCAAAGAP

SEQ ID NO: 1339 - protein, 36 aa, Artificial Sequence
  Description of Artificial Sequence: Synthetic peptide
PAMAMTAQESCPDSFYECLAVLVGDRWGGWAAAGAP

SEQ ID NO: 1340 - protein, 36 aa, Artificial Sequence; identical to SEQ ID NO: 1338
  Description of Artificial Sequence: Synthetic peptide

SEQ ID NO: 1341 - protein, 36 aa, Artificial Sequence
  Description of Artificial Sequence: Synthetic peptide
PAMAGTISQCCEENFYAGLAHLAGVGQWGCAAAGAP

SEQ ID NO: 1342 - protein, 29 aa, Artificial Sequence
  Description of Artificial Sequence: Synthetic peptide
DDDKTFYACLEFLLSGNPEGNSGPWDRCR

SEQ ID NO: 1343 - protein, 29 aa, Artificial Sequence
  Description of Artificial Sequence: Synthetic peptide
DDDKIFYSCLASLLHGGPQRNTGPWERCR

SEQ ID NO: 1344 - protein, 29 aa, Artificial Sequence
  Description of Artificial Sequence: Synthetic peptide
DDDKTFYSCLASLLTGPREQNRGAWERCR

SEQ ID NO: 1345 - protein, 29 aa, Artificial Sequence
  Description of Artificial Sequence: Synthetic peptide
DDDKSFYSCLASLLTASRLPSRGAWDGCH

SEQ ID NO: 1346 - protein, 29 aa, Artificial Sequence
  Description of Artificial Sequence: Synthetic peptide
DDDKSFYSCLGSLLTGAPQPIRGAWDRCR

SEQ ID NO: 1347 - protein, 29 aa, Artificial Sequence
  Description of Artificial Sequence: Synthetic peptide
DDDKSFYSCLASLWSGTGGSSRGRWEGCR

SEQ ID NO: 1348 - protein, 29 aa, Artificial Sequence
  Description of Artificial Sequence: Synthetic peptide
DDDKTFYSCLGALLAGTGERNLRPWGRCR

SEQ ID NO: 1349 - protein, 29 aa, Artificial Sequence
  Description of Artificial Sequence: Synthetic peptide
DDDKTFYSCLGSLLTGPSDPKRGPWGGCR

SEQ ID NO: 1350 - protein, 29 aa, Artificial Sequence
  Description of Artificial Sequence: Synthetic peptide
DDDKTFYKCLASVLTGSTQTKRRPWEGCR

SEQ ID NO: 1351 - protein, 29 aa, Artificial Sequence
  Description of Artificial Sequence: Synthetic peptide
DDDKPFYSCLATLLTDPPQSQRGAWGRCR

SEQ ID NO: 1352 - protein, 29 aa, Artificial Sequence
  Description of Artificial Sequence: Synthetic peptide
DDDKSFYSCLAALLTGSSQSSGGAWMLCR

SEQ ID NO: 1353 - protein, 29 aa, Artificial Sequence
  Description of Artificial Sequence: Synthetic peptide
DDDKSFYSCLASLVAGTPWPKGGSWERCR

SEQ ID NO: 1354 - protein, 29 aa, Artificial Sequence
  Description of Artificial Sequence: Synthetic peptide
DDDKSFYSCLASLVTGIPRSNSGTQVFCR

SEQ ID NO: 1355 - protein, 29 aa, Artificial Sequence
  Description of Artificial Sequence: Synthetic peptide
DDDKSFYSCMASLLTGTPESRRGMGERCG

SEQ ID NO: 1356 - protein, 29 aa, Artificial Sequence
  Description of Artificial Sequence: Synthetic peptide
DDDKAFYSCLASLLTGSPPAQGGPWDRCR

SEQ ID NO: 1357 - protein, 29 aa, Artificial Sequence
  Description of Artificial Sequence: Synthetic peptide
DDDKFFYSCLASLLSDTPQRRRGPGVRCR

SEQ ID NO: 1358 - protein, 29 aa, Artificial Sequence
  Description of Artificial Sequence: Synthetic peptide
DDDKTFYSCLASLLAGNPQPNRAGWEYCR

SEQ ID NO: 1359 - protein, 29 aa, Artificial Sequence
  Description of Artificial Sequence: Synthetic peptide
DDDKTFYSCLGSLLLGPPQKNPGPGERCR

SEQ ID NO: 1360 - protein, 29 aa, Artificial Sequence
  Description of Artificial Sequence: Synthetic peptide
DDDKMFYSCLESLLIGRWPRNGGSLSRCR

SEQ ID NO: 1361 - protein, 29 aa, Artificial Sequence
  Description of Artificial Sequence: Synthetic peptide
DDDKSFYSCLTFLLTGTPQANDASWERCR

SEQ ID NO: 1362 - protein, 29 aa, Artificial Sequence
  Description of Artificial Sequence: Synthetic peptide
DDDKSFYSCMAALLSGAPQKSRGRWERCG

SEQ ID NO: 1363 - protein, 29 aa, Artificial Sequence
  Description of Artificial Sequence: Synthetic peptide
DDDKAFYRCLAYLLAGRPQASGGGGVRCR

SEQ ID NO: 1364 - protein, 29 aa, Artificial Sequence
  Description of Artificial Sequence: Synthetic peptide
DDDKAFYSCLAALRERSPQMSRGTWGGCR

SEQ ID NO: 1365 - protein, 29 aa, Artificial Sequence
  Description of Artificial Sequence: Synthetic peptide
DDDKTFYACLAALLGGTAELHDGSLECRG

SEQ ID NO: 1366 - protein, 29 aa, Artificial Sequence
  Description of Artificial Sequence: Synthetic peptide
DDDKTFYSCLGSLLTGTLPPARGARNICR

SEQ ID NO: 1367 - protein, 29 aa, Artificial Sequence
  Description of Artificial Sequence: Synthetic peptide
DDDKTFYSCLSSLLAGSPLPRRDLWAGCR

SEQ ID NO: 1368 - protein, 29 aa, Artificial Sequence
  Description of Artificial Sequence: Synthetic peptide
DDDKAFYSCMASLLAGTPEAQGSAWVRCR

SEQ ID NO: 1369 - protein, 29 aa, Artificial Sequence
  Description of Artificial Sequence: Synthetic peptide
DDDKNFYACMESLVSVAPPSSRDPFECRR

SEQ ID NO: 1370 - protein, 29 aa, Artificial Sequence
  Description of Artificial Sequence: Synthetic peptide
  MOD_RES (19): Unknown amino acid
DDDKSFYSCLASLVSGTAXPNRGPWERCR

SEQ ID NO: 1371 - protein, 29 aa, Artificial Sequence
  Description of Artificial Sequence: Synthetic peptide
DDDKIFYSCLASLLDDTAQSRRGQWARCR

SEQ ID NO: 1372 - protein, 29 aa, Artificial Sequence
  Description of Artificial Sequence: Synthetic peptide
DDDKIFYSCLGALLSGTPQTSHVTSGRCR

SEQ ID NO: 1373 - protein, 29 aa, Artificial Sequence
  Description of Artificial Sequence: Synthetic peptide
TDDKTFYFCLASLLAGTQQQSRGAWERCG

SEQ ID NO: 1374 - protein, 29 aa, Artificial Sequence
  Description of Artificial Sequence: Synthetic peptide
DDDKAFYSCLASVLTGSPHPGRSRWERCR

SEQ ID NO: 1375 - protein, 29 aa, Artificial Sequence
  Description of Artificial Sequence: Synthetic peptide
DDDKTFYSCLESMLTGTPPPCRGHGERGR

SEQ ID NO: 1376 - protein, 29 aa, Artificial Sequence
  Description of Artificial Sequence: Synthetic peptide
DDDKTFESCLEALVSGGSRRERGLWYRCR

SEQ ID NO: 1377 - protein, 29 aa, Artificial Sequence
  Description of Artificial Sequence: Synthetic peptide
DDDKAFYSCLSSLLAGTRERHRDTWPRCG

SEQ ID NO: 1378 - protein, 29 aa, Artificial Sequence
  Description of Artificial Sequence: Synthetic peptide
DDDKTFHSCLAALVTGTPQQKRGPWERCR

SEQ ID NO: 1379 - protein, 29 aa, Artificial Sequence
  Description of Artificial Sequence: Synthetic peptide
DDDKTFYLCLASLQTVTRLGDRVPWERCR

SEQ ID NO: 1380 - protein, 29 aa, Artificial Sequence
  Description of Artificial Sequence: Synthetic peptide
DDDKTFYSCLVSLLNGTAKPNRGQWEGCR

SEQ ID NO: 1381 - protein, 29 aa, Artificial Sequence
  Description of Artificial Sequence: Synthetic peptide
DDDKSFYSCLASLSNCTPGLLRCQWERCR

SEQ ID NO: 1382 - protein, 29 aa, Artificial Sequence
  Description of Artificial Sequence: Synthetic peptide
DDDKTFYSCLSSLLASTPQPNRGAWLCRR

SEQ ID NO: 1383 - protein, 29 aa, Artificial Sequence
  Description of Artificial Sequence: Synthetic peptide
DDDKSFYSCLASLSNCTPGLLRCQWERCR

SEQ ID NO: 1384 - protein, 29 aa, Artificial Sequence
  Description of Artificial Sequence: Synthetic peptide
DDDKTFYSCLGALLSGAPQTYRGPGAGCR

SEQ ID NO: 1385 - protein, 29 aa, Artificial Sequence
  Description of Artificial Sequence: Synthetic peptide
DDDKTFYSCLVSLLNGTAKPNRGQWEGCR

SEQ ID NO: 1386 - protein, 29 aa, Artificial Sequence
  Description of Artificial Sequence: Synthetic peptide
DDDKHFYSCLSSLLTAPPQSTRGPAGRHC

SEQ ID NO: 1387 - protein, 29 aa, Artificial Sequence
  Description of Artificial Sequence: Synthetic peptide
DDDKTFYSCLASLLNGNTQPNGGQWVRCR

SEQ ID NO: 1388 - protein, 29 aa, Artificial Sequence
  Description of Artificial Sequence: Synthetic peptide
DDDKVFYTCLASLSTGTPQRQSGEWQRCR

SEQ ID NO: 1389 - protein, 29 aa, Artificial Sequence
  Description of Artificial Sequence: Synthetic peptide
DDDKTFYSCLVSLLNGTAKPNRGQWEGCR

SEQ ID NO: 1390 - protein, 29 aa, Artificial Sequence
  Description of Artificial Sequence: Synthetic peptide
DDDKPFYSCLASLIQGTPLPERGMWERCR

SEQ ID NO: 1391 - protein, 28 aa, Artificial Sequence
  Description of Artificial Sequence: Synthetic peptide
DDDKTFYSCVSWLLTGARQRDGVWERCR

SEQ ID NO: 1392 - protein, 29 aa, Artificial Sequence
  Description of Artificial Sequence: Synthetic peptide
DDDKTFYSCLVSLLNGTAKPNRGQWEGCR

SEQ ID NO: 1393 - protein, 29 aa, Artificial Sequence
  Description of Artificial Sequence: Synthetic peptide
DDDKAFYGCLAALLTGARQPSRGVGERCF

SEQ ID NO: 1394 - protein, 29 aa, Artificial Sequence
  Description of Artificial Sequence: Synthetic peptide
DDDKTFYSCLVSLLNGTAKPNRGQWEGCR

SEQ ID NO: 1395 - protein, 29 aa, Artificial Sequence
  Description of Artificial Sequence: Synthetic peptide
DDDKTFYSCLASLLAGSPQPKRAGWEYCR

SEQ ID NO: 1396 - protein, 29 aa, Artificial Sequence
  Description of Artificial Sequence: Synthetic peptide
DDDKPFYSCLESLVTGRPQADRGVWERCR

SEQ ID NO: 1397 - protein, 29 aa, Artificial Sequence
  Description of Artificial Sequence: Synthetic peptide
DDDKTFYSCLTSLSRGSAHGLSGRWERCR

SEQ ID NO: 1398 - protein, 30 aa, Artificial Sequence
  Description of Artificial Sequence: Synthetic peptide
DDDDKTFYFCLATLLTGPPVPNREPWACYR

SEQ ID NO: 1399 - protein, 29 aa, Artificial Sequence
  Description of Artificial Sequence: Synthetic peptide
DDDKIFYSCLRTLGTNPPEPVRGPFDRCG

SEQ ID NO: 1400 - protein, 29 aa, Artificial Sequence
  Description of Artificial Sequence: Synthetic peptide
DDDKTFYSCLVSLLNGTAKPNRGQWEGCR

SEQ ID NO: 1401 - protein, 29 aa, Artificial Sequence
  Description of Artificial Sequence: Synthetic peptide
NDDKSFYSCVASLVNEGPSQVGVLGERCR

SEQ ID NO: 1402 - protein, 29 aa, Artificial Sequence
  Description of Artificial Sequence: Synthetic peptide
DDDKTFYSCLASMLTGPPHPDRVPWDRCR

SEQ ID NO: 1403 - protein, 29 aa, Artificial Sequence
  Description of Artificial Sequence: Synthetic peptide
DDDKKFYSCLVELVNGTSPPARGLWERCR

SEQ ID NO: 1404 - protein, 29 aa, Artificial Sequence
  Description of Artificial Sequence: Synthetic peptide
DDDKVFYSCLESLVSGTPEVNGRAWERCR

SEQ ID NO: 1405 - protein, 29 aa, Artificial Sequence
  Description of Artificial Sequence: Synthetic peptide
YDDKRFYYCLASLASGTLQTNREQWERCR

SEQ ID NO: 1406 - protein, 29 aa, Artificial Sequence
  Description of Artificial Sequence: Synthetic peptide
DDDKTFYSCLESLLNGTPQRNRGQWDPCS

SEQ ID NO: 1407 - protein, 29 aa, Artificial Sequence
  Description of Artificial Sequence: Synthetic peptide
DDDKTFYTCLQALITGYERPVGGRWESCR

SEQ ID NO: 1408 - protein, 29 aa, Artificial Sequence
  Description of Artificial Sequence: Synthetic peptide
DDDKAFYSCLATLLYGNPPSSRGQWHRCR

SEQ ID NO: 1409 - protein, 29 aa, Artificial Sequence
  Description of Artificial Sequence: Synthetic peptide
DDDKVFYSCLESLVSGTPEVNGRAWERCR

SEQ ID NO: 1410 - protein, 29 aa, Artificial Sequence
  Description of Artificial Sequence: Synthetic peptide
GDDKTFYACLSSLLYGTADWSQGQRDRCR

SEQ ID NO: 1411 - protein, 29 aa, Artificial Sequence
  Description of Artificial Sequence: Synthetic peptide
DDDKSFYSCMESLWTDTPQPNRGRWERCR

SEQ ID NO: 1412 - protein, 29 aa, Artificial Sequence
  Description of Artificial Sequence: Synthetic peptide
DDDKTFYSCLASLLTVSPEPSRGPWERCR

SEQ ID NO: 1413 - protein, 29 aa, Artificial Sequence
  Description of Artificial Sequence: Synthetic peptide
DDDKTFYSCMVQLLTGTPEKSCVTWERWR

SEQ ID NO: 1414 - protein, 29 aa, Artificial Sequence
  Description of Artificial Sequence: Synthetic peptide
DDDKTFYSCLVSLLNGTAKPNRGQWEGCR

SEQ ID NO: 1415 - protein, 29 aa, Artificial Sequence
  Description of Artificial Sequence: Synthetic peptide
DDDKTFYSCVASLVVGTAQPQCGPWQGWG

SEQ ID NO: 1416 - protein, 29 aa, Artificial Sequence
  Description of Artificial Sequence: Synthetic peptide
DDDKTFYSCLAGLVTGPPRQNWGAGDACR

SEQ ID NO: 1417 - protein, 29 aa, Artificial Sequence
  Description of Artificial Sequence: Synthetic peptide
DDDKTFYSCMSSLSTTAPQPKSGRWDRCR

SEQ ID NO: 1418 - protein, 29 aa, Artificial Sequence
  Description of Artificial Sequence: Synthetic peptide
DDDKTFYSCLASLVNGSLQPNRAPGELCR

SEQ ID NO: 1419 - protein, 29 aa, Artificial Sequence
  Description of Artificial Sequence: Synthetic peptide
DDDKTFYSCLVSLLNGTAKPNRGQWEGCR

SEQ ID NO: 1420 - protein, 29 aa, Artificial Sequence
  Description of Artificial Sequence: Synthetic peptide
DDDKTFYSCLVSLLNGTAKPNRGQWEGCR

SEQ ID NO: 1421 - protein, 29 aa, Artificial Sequence
  Description of Artificial Sequence: Synthetic peptide
DDDKSFYSCLESLLNGGPQQKRGPWEGCR

SEQ ID NO: 1422 - protein, 29 aa, Artificial Sequence
  Description of Artificial Sequence: Synthetic peptide
DDDKTFYSCLASLLNGNTQPNGGQWVRCR

SEQ ID NO: 1423 - protein, 29 aa, Artificial Sequence
  Description of Artificial Sequence: Synthetic peptide
DDDKSFYSCLASLSNCTPGLLRCQWERCR

SEQ ID NO: 1424 - protein, 29 aa, Artificial Sequence
  Description of Artificial Sequence: Synthetic peptide
DDDKNFYSCLSALLNGNTVSDRGQGERCF

SEQ ID NO: 1425 - protein, 27 aa, Artificial Sequence
  Description of Artificial Sequence: Synthetic peptide
DDTFYSCLASLVNGSPQAYGGPREHCR

SEQ ID NO: 1426 - protein, 29 aa, Artificial Sequence
  Description of Artificial Sequence: Synthetic peptide
DDDKIFYSCLAWLMTGPAPPYRGPWSCWS

SEQ ID NO: 1427 - protein, 29 aa, Artificial Sequence
  Description of Artificial Sequence: Synthetic peptide
DDDKIFYACLSSLSTGTWQPKRGPGERCR

SEQ ID NO: 1428 - protein, 29 aa, Artificial Sequence
  Description of Artificial Sequence: Synthetic peptide
DDDKSFYSCLASLSNCTPGLLRCQWERCR

SEQ ID NO: 1429 - protein, 29 aa, Artificial Sequence
  Description of Artificial Sequence: Synthetic peptide
DDDKTFYSCLGSLINGTPPPHRGLWQGCR

SEQ ID NO: 1430 - protein, 29 aa, Artificial Sequence
  Description of Artificial Sequence: Synthetic peptide
DDDKTFYSCLVSLLNGTAKPNRGQWEGCR

SEQ ID NO: 1431 - protein, 29 aa, Artificial Sequence
  Description of Artificial Sequence: Synthetic peptide
DDDKQFYSCLAFLASGIAQPQPGAWELCR

SEQ ID NO: 1432 - protein, 29 aa, Artificial Sequence
  Description of Artificial Sequence: Synthetic peptide
DDDKTFYCCLAALLTGAPPPKGGTCERCG

SEQ ID NO: 1433 - protein, 43 aa, Artificial Sequence
  Description of Artificial Sequence: Synthetic peptide
FHENFYDWFARKDSGGSGGSGGSDLCVLEELFWGDSLFDYCTG

SEQ ID NO: 1434 - protein, 43 aa, Artificial Sequence
  Description of Artificial Sequence: Synthetic peptide
  MOD_RES (6): Unknown amino acid
FHENFXDWFVRQVSGGSGGSGGSNLCVLEELFWGASLFGECSG

SEQ ID NO: 1435 - protein, 43 aa, Artificial Sequence
  Description of Artificial Sequence: Synthetic peptide
SHGNFSEWFVRQGYGGSGGSGGSDLCVLEELYWGASLFGYCSG

SEQ ID NO: 1436 - protein, 43 aa, Artificial Sequence
  Description of Artificial Sequence: Synthetic peptide
  MOD_RES (12): Unknown amino acid
FQESFYDWFVRXVTGGSGGSGGSDLCGVEDLVWGSALSGYCAG

SEQ ID NO: 1437 - protein, 43 aa, Artificial Sequence
  Description of Artificial Sequence: Synthetic peptide
FHENFNDWFVREVSGGSGGSGGSDLCVLEELFWGASLFSYCSG

SEQ ID NO: 1438 - protein, 43 aa, Artificial Sequence
  Description of Artificial Sequence: Synthetic peptide
  MOD_RES (12): Unknown amino acid
SHENFYDWFVRXGPGGSGGSGGSHLCVLEELFWGDSLFGACPG

SEQ ID NO: 1439 - protein, 43 aa, Artificial Sequence
  Description of Artificial Sequence: Synthetic peptide
  MOD_RES (40): Unknown amino acid
FHENFYDWFARQVSGGSGGSGGSHLCVLEELFWGASLFAXCSD

SEQ ID NO: 1440 - protein, 43 aa, Artificial Sequence
  Description of Artificial Sequence: Synthetic peptide
  MOD_RES (12): Unknown amino acid
FPDNFYDWFVRXVSGGSGGSGGSHLCVLEELFWGASPFGYCSG

SEQ ID NO: 1441 - protein, 43 aa, Artificial Sequence
  Description of Artificial Sequence: Synthetic peptide
FQENFYDWFGRQISGGSGGSGGSPLCDVEELFWGVSLFGYCTG

SEQ ID NO: 1442 - protein, 43 aa, Artificial Sequence
  Description of Artificial Sequence: Synthetic peptide
  MOD_RES (12): Unknown amino acid
FQENFYDWFVRXASGGSGGSGGSHLCALEEQFWGSSQFRYCSG

SEQ ID NO: 1443 - protein, 43 aa, Artificial Sequence
  Description of Artificial Sequence: Synthetic peptide
  MOD_RES (33): Unknown amino acid
FHENFYDWFARQVYGGSGGSGGSHLCVLEELFXGASLFATCSD

SEQ ID NO: 1444 - protein, 43 aa, Artificial Sequence
  Description of Artificial Sequence: Synthetic peptide
  MOD_RES (33): Unknown amino acid
FHENFYDRIVRQVAGGSGGSGGSALCVREELFXGDSLFGDCSG

SEQ ID NO: 1445 - protein, 43 aa, Artificial Sequence
  Description of Artificial Sequence: Synthetic peptide
  MOD_RES (38): Unknown amino acid
FHKNFYDWFDRQVSGGSGGSGSSRLCDLEELFWGASLXGHCSG

SEQ ID NO: 1446 - protein, 43 aa, Artificial Sequence
  Description of Artificial Sequence: Synthetic peptide
FHENFYDWFIRQDSGGSGGSGGSHLCAFEELLGGASPFGYCSG

SEQ ID NO: 1447 - protein, 43 aa, Artificial Sequence
  Description of Artificial Sequence: Synthetic peptide
  MOD_RES (12): Unknown amino acid
SNENFYDWFDRXVSGGSGGSGGSHLCLLEELSWGASLFGYCYG

SEQ ID NO: 1448 - protein, 43 aa, Artificial Sequence
  Description of Artificial Sequence: Synthetic peptide
  MOD_RES (31): Unknown amino acid
FHESFYDWFDRQVSGGSGGSGGSHLCVLEEXELGASVFGCCSG

SEQ ID NO: 1449 - protein, 36 aa, Artificial Sequence
  Description of Artificial Sequence: Synthetic peptide
  MOD_RES (12): Unknown amino acid
FHETFYDWFDRXVSGGSGGSGEELFGGASLFGYPSG

SEQ ID NO: 1450 - protein, 43 aa, Artificial Sequence
  Description of Artificial Sequence: Synthetic peptide
  MOD_RES (33): Unknown amino acid
SHENFYDWFGRQVSGGSGGSGGSNLCDLDEVSXGASLCGYRSG

SEQ ID NO: 1451 - protein, 44 aa, Artificial Sequence
  Description of Artificial Sequence: Synthetic peptide
  MOD_RES (3): Unknown amino acid
  MOD_RES (43): Unknown amino acid
FHXNFYDWFFCQVPEWIPMTLAVLTCAVLEEPIWGDSLFGYGXE

SEQ ID NO: 1452 - protein, 43 aa, Artificial Sequence
  Description of Artificial Sequence: Synthetic peptide
  MOD_RES (14): Unknown amino acid
SHENFYDWFVRQVXGGSGGSGGSHLCDLEELLGGASLMGSCSG

SEQ ID NO: 1453 - protein, 42 aa, Artificial Sequence
  Description of Artificial Sequence: Synthetic peptide
  MOD_RES (12): Unknown amino acid
  MOD_RES (38): Unknown amino acid
SHENFYDWFVRXVSGGAAAGAPPAMASHENFYDWFVRXVSGG

SEQ ID NO: 1454 - protein, 40 aa, Artificial Sequence
  Description of Artificial Sequence: Synthetic peptide
  MOD_RES (12): Unknown amino acid
FHENFYDWFIRXVGGGSGGSGGSDLCVLEDDCSRAAAGAP

SEQ ID NO: 1455 - protein, 25 aa, Artificial Sequence
  Description of Artificial Sequence: Synthetic peptide
  MOD_RES (22): Unknown amino acid
DYKDASVSGTFHDAFYEWFWRXVGS

SEQ ID NO: 1456 - protein, 43 aa, Artificial Sequence
  Description of Artificial Sequence: Synthetic peptide
  MOD_RES (24): Unknown amino acid
  MOD_RES (40): Unknown amino acid
FHENFYDLVPSAGSWWIRWLWRFXPVRLGRTVLGCFSDRXLFW

SEQ ID NO: 1457 - protein, 28 aa, Artificial Sequence
  Description of Artificial Sequence: Synthetic peptide
FHENFYDWFDRQVSGGSGGSVRAAAGAP

SEQ ID NO: 1458 - protein, 43 aa, Artificial Sequence
  Description of Artificial Sequence: Synthetic peptide
  MOD_RES (29): Unknown amino acid
VHENFYDWFDRQVSGGSGGSGGSQLCDLXEVIWGASLFGYCTG

SEQ ID NO: 1459 - protein, 43 aa, Artificial Sequence
  Description of Artificial Sequence: Synthetic peptide
  MOD_RES (12): Unknown amino acid
FHENFYDWFDRXVSGGSGGSGGSHLCVPEEQFWGASRFGYCSA

SEQ ID NO: 1460 - protein, 37 aa, Artificial Sequence
  Description of Artificial Sequence: Synthetic peptide
  MOD_RES (32): Unknown amino acid
FHDNFYDWFVRQVSGGSGGSGGSRQCQGASLXGYCSG

SEQ ID NO: 1461 - protein, 33 aa, Artificial Sequence
  Description of Artificial Sequence: Synthetic peptide
  MOD_RES (12): Unknown amino acid
FHEDFYDWFVRXVPGGSGGSGGSHLCVPGYCSS

SEQ ID NO: 1462 - protein, 36 aa, Artificial Sequence
  Description of Artificial Sequence: Synthetic peptide
  MOD_RES (12): Unknown amino acid
FRENFYDWFVCXVSGGSGGSGGSNLCVLEEAAAGAP

SEQ ID NO: 1463 - protein, 38 aa, Artificial Sequence
  Description of Artificial Sequence: Synthetic peptide
  MOD_RES (28): Unknown amino acid
GHDNFYDWFVRQVSGGSGGSGGSHLCVXGAFPWGYCSD

SEQ ID NO: 1464 - protein, 29 aa, Artificial Sequence
  Description of Artificial Sequence: Synthetic peptide
  MOD_RES (3): Unknown amino acid
FHXNFYDWFVRQVYGGSGGSGTGAAAGAP

SEQ ID NO: 1465 - protein, 43 aa, Artificial Sequence
  Description of Artificial Sequence: Synthetic peptide
  MOD_RES (33): Unknown amino acid
FHENFYDWFGRQVYGGSGGSGGSPVCILGELSXGGALFGDCSG

SEQ ID NO: 1466 - protein, 43 aa, Artificial Sequence
  Description of Artificial Sequence: Synthetic peptide
  MOD_RES (12): Unknown amino acid
FHENFYDWFVRXLSGGSGGSGGSHLCVPEERLWGDPLFGYCSG

SEQ ID NO: 1467 - protein, 27 aa, Artificial Sequence
  Description of Artificial Sequence: Synthetic peptide
  MOD_RES (3): Unknown amino acid
FHXNFYDWFVRQVSGGSGGSGGSHPAR

SEQ ID NO: 1468 - protein, 43 aa, Artificial Sequence
  Description of Artificial Sequence: Synthetic peptide
  MOD_RES (33): Unknown amino acid
FHENFYDWFVRQVTGGSGGSGGSHLCVLEELSXGAALPGYCSG

SEQ ID NO: 1469 - protein, 30 aa, Artificial Sequence
  Description of Artificial Sequence: Synthetic peptide
  MOD_RES (27): Unknown amino acid
VQGSFYDWFVRQVSGGSGGSGGSHLCXGSG

SEQ ID NO: 1470 - protein, 37 aa, Artificial Sequence
  Description of Artificial Sequence: Synthetic peptide
  MOD_RES (33): Unknown amino acid
FHENFYEWFVRQVSGGSGGSGGSHRCDVEELHXCASG

SEQ ID NO: 1471 - protein, 25 aa, Artificial Sequence
  Description of Artificial Sequence: Synthetic peptide
  MOD_RES (17): Unknown amino acid
DYKDGGYWGSFYEGLMXLVQSGTSG

SEQ ID NO: 1472 - protein, 43 aa, Artificial Sequence
  Description of Artificial Sequence: Synthetic peptide
  MOD_RES (40): Unknown amino acid
FHENFYDWFDRQVSGGSGGSGGSHRCVLEERFWGASLFGXCSG

SEQ ID NO: 1473 - protein, 43 aa, Artificial Sequence
  Description of Artificial Sequence: Synthetic peptide
  MOD_RES (33): Unknown amino acid
SHENFYDWFVHQVSGGSGGSGGSHLCVLEERFXGPSLFGYCSG

SEQ ID NO: 1474 - protein, 43 aa, Artificial Sequence
  Description of Artificial Sequence: Synthetic peptide
  MOD_RES (33): Unknown amino acid
FHANFYDWFFRQVSGGSGGSGGSDLCVLQDMFXGGSGAAAGAP

SEQ ID NO: 1475 - protein, 43 aa, Artificial Sequence
  Description of Artificial Sequence: Synthetic peptide
  MOD_RES (33): Unknown amino acid
FQDNFYDWFVRQISGGSGGSGGSHLCVLESWFXGASLFGYCSG

SEQ ID NO: 1476 - protein, 43 aa, Artificial Sequence
  Description of Artificial Sequence: Synthetic peptide
  MOD_RES (8): Unknown amino acid
FHETFYDXLGRLVFGGSGGSGGSHLCVPEELFWGTSLLSYCSG

SEQ ID NO: 1477 - protein, 29 aa, Artificial Sequence
  Description of Artificial Sequence: Synthetic peptide
  MOD_RES (26): Unknown amino acid
FHENFYDWFVRQVSGGSGGSGGSHLXGSG

SEQ ID NO: 1478 - protein, 43 aa, Artificial Sequence
  Description of Artificial Sequence: Synthetic peptide
  MOD_RES (33): Unknown amino acid
FHENFYDWFVRQVSGGSGGSGGSHRCGLEEPVXGASLVGYCAG

SEQ ID NO: 1479 - protein, 24 aa, Artificial Sequence
  Description of Artificial Sequence: Synthetic peptide
  MOD_RES (14): Unknown amino acid
FHANFYDWFVRQVXGGSGGSGGSG

SEQ ID NO: 1480 - protein, 43 aa, Artificial Sequence
  Description of Artificial Sequence: Synthetic peptide
  MOD_RES (33): Unknown amino acid
FHEDFYDWFVRQVGGGSGGSGGSHLCVREELFXGASLLGDCSG

SEQ ID NO: 1481 - protein, 31 aa, Artificial Sequence
  Description of Artificial Sequence: Synthetic peptide
  MOD_RES (1): Unknown amino acid
XHENFYDWFVRQLSGGSGGSDGSHLFGYGSG

SEQ ID NO: 1482 - protein, 43 aa, Artificial Sequence
  Description of Artificial Sequence: Synthetic peptide
FHENFYDWFDRQVGGGSGGSGGFSPVRTGRTVLGGFSVRLLLW

SEQ ID NO: 1483 - protein, 33 aa, Artificial Sequence
  Description of Artificial Sequence: Synthetic peptide
  MOD_RES (12): Unknown amino acid
SHDNFYDWFVRXVSGGSGGSGGSPLCVLGNCSG

SEQ ID NO: 1484 - protein, 43 aa, Artificial Sequence
  Description of Artificial Sequence: Synthetic peptide
  MOD_RES (12): Unknown amino acid
FYDNFYHWFDRXVSGGSGGSGGSHLCVLEERVCGASLFDYRSG

SEQ ID NO: 1485 - protein, 43 aa, Artificial Sequence
  Description of Artificial Sequence: Synthetic peptide
  MOD_RES (33): Unknown amino acid
FSEHFYDWFARQVSGGSGGSGGSHLCVLDERFXGASMVGYCSG

SEQ ID NO: 1486 - protein, 29 aa, Artificial Sequence
  Description of Artificial Sequence: Synthetic peptide
  MOD_RES (26): Unknown amino acid
FPENFYDWFDRQVSGGSGGGASLFGXGSG

SEQ ID NO: 1487 - protein, 43 aa, Artificial Sequence
  Description of Artificial Sequence: Synthetic peptide
FHENFYDWFDRQVSGGSSGSGGSHQCVQEERFWGASLCGYCSG

SEQ ID NO: 1488 - protein, 43 aa, Artificial Sequence
  Description of Artificial Sequence: Synthetic peptide
  MOD_RES (33): Unknown amino acid
FHDSFYDWFVRQVSGGSGGSGGSHLCGLEELFXGASRFGDCSG

SEQ ID NO: 1489 - protein, 35 aa, Artificial Sequence
  Description of Artificial Sequence: Synthetic peptide
  MOD_RES (12): Unknown amino acid
FHGDFYDWFVRXVSGGSGGSGGSHLCVLEELYCSG

SEQ ID NO: 1490 - protein, 43 aa, Artificial Sequence
  Description of Artificial Sequence: Synthetic peptide
  MOD_RES (12): Unknown amino acid
FHDNFYDWFVRXVSGGSGGSGGSHLCVVEERFWGGSPIGYCSG

SEQ ID NO: 1491 - protein, 33 aa, Artificial Sequence
  Description of Artificial Sequence: Synthetic peptide
FQDNFYDWFVRQVSGGSGGSGGSHRCVLEGCSG

SEQ ID NO: 1492 - protein, 26 aa, Artificial Sequence
  Description of Artificial Sequence: Synthetic peptide
FHENFYDWFDRQVSGGSACLFGYCSG

SEQ ID NO: 1493 - protein, 18 aa, Artificial Sequence
  Description of Artificial Sequence: Synthetic peptide
  MOD_RES (12): Unknown amino acid
YHENFYDWFVRXVSGGSG

SEQ ID NO: 1494 - protein, 32 aa, Artificial Sequence
  Description of Artificial Sequence: Synthetic peptide
  MOD_RES (12): Unknown amino acid
VHESFYDWFVRXVAGGSGGSGGSHLCDVDCSG

SEQ ID NO: 1495 - protein, 29 aa, Artificial Sequence
  Description of Artificial Sequence: Synthetic peptide
  MOD_RES (26): Unknown amino acid
FHDNFYDWFDRQVSGGSGGSGSPFGXRSD

SEQ ID NO: 1496 - protein, 43 aa, Artificial Sequence
  Description of Artificial Sequence: Synthetic peptide
  MOD_RES (3): Unknown amino acid
FHXHFYDWFDRQVSGGSGGSGGSLLCVGEEPFWGASLFAYCSG

SEQ ID NO: 1497 - protein, 22 aa, Artificial Sequence
  Description of Artificial Sequence: Synthetic peptide
FHENFYDWFVRQVSGGSGGSGG

SEQ ID NO: 1498 - protein, 43 aa, Artificial Sequence
  Description of Artificial Sequence: Synthetic peptide
  MOD_RES (12): Unknown amino acid
FHESFYDWFVRXVPGGSGGSGGSQLCVQEELFEGDSLLGDCSG

SEQ ID NO: 1499 - protein, 36 aa, Artificial Sequence
  Description of Artificial Sequence: Synthetic peptide
  MOD_RES (26): Unknown amino acid
FHENFYEWFDRQVSGGSGGVLDERFXGACPSGYCSG

SEQ ID NO: 1500 - protein, 43 aa, Artificial Sequence
  Description of Artificial Sequence: Synthetic peptide
  MOD_RES (12): Unknown amino acid
FHDNFYDWFVRXVAGGSGGSGGSHLCVPEELFWGASLFGYCSG

SEQ ID NO: 1501 - protein, 43 aa, Artificial Sequence
  Description of Artificial Sequence: Synthetic peptide
  MOD_RES (12): Unknown amino acid
FGEDFYDWFVRXVSGGSGGSGGSHLCVLDELFWDASPFGFCPG

SEQ ID NO: 1502 - protein, 42 aa, Artificial Sequence
  Description of Artificial Sequence: Synthetic peptide
  MOD_RES (1): Unknown amino acid
XHDNFYGWFDRQVSGGSGGSGGSHLCVLDELLWGASLFGYCS

SEQ ID NO: 1503 - protein, 30 aa, Artificial Sequence
  Description of Artificial Sequence: Synthetic peptide
  MOD_RES (12): Unknown amino acid
FQENFYDWFVRXVSGDELSGGASQCGSCSG

SEQ ID NO: 1504 - protein, 43 aa, Artificial Sequence
  Description of Artificial Sequence: Synthetic peptide
  MOD_RES (40): Unknown amino acid
SHESFYDWFVRQVSGGSGGSGGSDLCVWEELCGGAPLVGXGSS

SEQ ID NO: 1505 - protein, 25 aa, Artificial Sequence
  Description of Artificial Sequence: Synthetic peptide
FPENFYDWFDRQVSGGSGGSGGSSG

SEQ ID NO: 1506 - protein, 43 aa, Artificial Sequence
  Description of Artificial Sequence: Synthetic peptide
FRENFYDWFERQVSGGSGGSGGSHLCVLEELSWGASTFGSCSG

SEQ ID NO: 1507 - protein, 43 aa, Artificial Sequence
  Description of Artificial Sequence: Synthetic peptide
  MOD_RES (12): Unknown amino acid
IHVDFYDWFARXVSGGSGGSGGSSLCVLDELFWDASLFGDCAG

SEQ ID NO: 1508 - protein, 43 aa, Artificial Sequence
  Description of Artificial Sequence: Synthetic peptide
FHASFYDWFDRQVSGGSGGSGGSHLCDLEGLFWGAAPFGYCSG

SEQ ID NO: 1509 - protein, 43 aa, Artificial Sequence
  Description of Artificial Sequence: Synthetic peptide
  MOD_RES (12): Unknown amino acid
SDANFYDWFLRXVSGGSGGSGGSHLCALEEQFWDASLFGDCSG

SEQ ID NO: 1510 - protein, 43 aa, Artificial Sequence
  Description of Artificial Sequence: Synthetic peptide
  MOD_RES (12): Unknown amino acid
FHDKFYDWFVSXVAGGSGGSGGSHLCVLEDRFWGSSLSGYCSG

SEQ ID NO: 1511 - protein, 43 aa, Artificial Sequence
  Description of Artificial Sequence: Synthetic peptide
  MOD_RES (42): Unknown amino acid
FHDNFYDWFVRQVTDGSGGSGGSQLCVVEDLFWDASRFGYCXG

SEQ ID NO: 1512 - protein, 43 aa, Artificial Sequence
  Description of Artificial Sequence: Synthetic peptide
  MOD_RES (12): Unknown amino acid
VSEDFYEWFVRXASGGSGGSGGSNLCVLEELFWGSSLIGDCSG

SEQ ID NO: 1513 - protein, 43 aa, Artificial Sequence
  Description of Artificial Sequence: Synthetic peptide
  MOD_RES (32): Unknown amino acid
FPENFYDWFVRQVSGGSGGSGGSHLCVLEELXWGASMFGYCSG

SEQ ID NO: 1514 - protein, 43 aa, Artificial Sequence
  Description of Artificial Sequence: Synthetic peptide
  MOD_RES (40): Unknown amino acid
FQENFYDWFVRQVSGGSGGSGGSHLCVLEALFWGASLFGXCSG

SEQ ID NO: 1515 - protein, 25 aa, Artificial Sequence
  Description of Artificial Sequence: Synthetic peptide
  MOD_RES (12): Unknown amino acid
  MOD_RES (24): Unknown amino acid
DYKDGRGGRRFXGRSSVVLWKRLXR

SEQ ID NO: 1516 - protein, 26 aa, Artificial Sequence
  Description of Artificial Sequence: Synthetic peptide
  MOD_RES (19): Unknown amino acid
DTKTFIGITGVLPRLSAVXGFWGGSW

SEQ ID NO: 1517 - protein, 43 aa, Artificial Sequence
  Description of Artificial Sequence: Synthetic peptide
  MOD_RES (29): Unknown amino acid
CHENFYVWFVSQVAGGSGGSGGSRLCIMXELFRGASLFGYSSG

SEQ ID NO: 1518 - protein, 43 aa, Artificial Sequence
  Description of Artificial Sequence: Synthetic peptide
  MOD_RES (12): Unknown amino acid
FHANFYDWFVRXVSGGSGGSGGSHLCVLEELVSGPSLLGYCSG

SEQ ID NO: 1519 - protein, 43 aa, Artificial Sequence
  Description of Artificial Sequence: Synthetic peptide
  MOD_RES (12): Unknown amino acid
FHEKFYDWFDLXLSGGSGGSGGSHLCVREEPFWGASLFGYCPG

SEQ ID NO: 1520 - protein, 20 aa, Artificial Sequence
  Description of Artificial Sequence: Synthetic peptide
HLCVLEELFWGASLFGYCSG

SEQ ID NO: 1521 - protein, 20 aa, Artificial Sequence
  Description of Artificial Sequence: Synthetic peptide
WLDQEWAWVQCEVYGRGCPS

SEQ ID NO: 1522 - protein, 33 aa, Artificial Sequence; identical to SEQ ID NO: 1483
  Description of Artificial Sequence: Synthetic peptide
  MOD_RES (12): Unknown amino acid

SEQ ID NO: 1523 - protein, 43 aa, Artificial Sequence; identical to SEQ ID NO: 1484
  Description of Artificial Sequence: Synthetic peptide
  MOD_RES (12): Unknown amino acid

SEQ ID NO: 1524 - protein, 43 aa, Artificial Sequence; identical to SEQ ID NO: 1487
  Description of Artificial Sequence: Synthetic peptide

SEQ ID NO: 1525 - protein, 35 aa, Artificial Sequence; identical to SEQ ID NO: 1489
  Description of Artificial Sequence: Synthetic peptide
  MOD_RES (12): Unknown amino acid

SEQ ID NO: 1526 - protein, 33 aa, Artificial Sequence; identical to SEQ ID NO: 1491
  Description of Artificial Sequence: Synthetic peptide

SEQ ID NO: 1527 - protein, 26 aa, Artificial Sequence
  Description of Artificial Sequence: Synthetic peptide
FHENFYDWFDRQVSGGSACLFGYCSG

SEQ ID NO: 1528 - protein, 32 aa, Artificial Sequence; identical to SEQ ID NO: 1494
  Description of Artificial Sequence: Synthetic peptide
  MOD_RES (12): Unknown amino acid

SEQ ID NO: 1529 - protein, 36 aa, Artificial Sequence; identical to SEQ ID NO: 1499
  Description of Artificial Sequence: Synthetic peptide
  MOD_RES (26): Unknown amino acid

SEQ ID NO: 1530 - protein, 30 aa, Artificial Sequence; identical to SEQ ID NO: 1503
  Description of Artificial Sequence: Synthetic peptide
  MOD_RES (12): Unknown amino acid

SEQ ID NO: 1531 - protein, 43 aa, Artificial Sequence; identical to SEQ ID NO: 1504
  Description of Artificial Sequence: Synthetic peptide
  MOD_RES (40): Unknown amino acid

SEQ ID NO: 1532 - protein, 24 aa, Artificial Sequence
  Description of Artificial Sequence: Synthetic peptide
  MOD_RES (14): Unknown amino acid
FHANFYDWFVRQVXGGSGGSGGSG

SEQ ID NO: 1533 - protein, 18 aa, Artificial Sequence
  Description of Artificial Sequence: Synthetic peptide
  MOD_RES (12): Unknown amino acid
YHENFYDWFVRXVSGGSG

SEQ ID NO: 1534 - protein, 22 aa, Artificial Sequence
  Description of Artificial Sequence: Synthetic peptide
FHENFYDWFVRQVSGGSGGSGG

SEQ ID NO: 1535 - protein, 25 aa, Artificial Sequence
  Description of Artificial Sequence: Synthetic peptide
FPENFYDWFDRQVSGGSGGSGGSSG

SEQ ID NO: 1536 - protein, 29 aa, Artificial Sequence
  Description of Artificial Sequence: Synthetic peptide
  MOD_RES (26): Unknown amino acid
FHENFYDWFVRQVSGGSGGSGGSHLXGSG

SEQ ID NO: 1537 - protein, 31 aa, Artificial Sequence; identical to SEQ ID NO: 1481
  Description of Artificial Sequence: Synthetic peptide
  MOD_RES (1): Unknown amino acid

SEQ ID NO: 1538 - protein, 43 aa, Artificial Sequence; identical to SEQ ID NO: 1482
  Description of Artificial Sequence: Synthetic peptide

SEQ ID NO: 1539 - protein, 29 aa, Artificial Sequence
  Description of Artificial Sequence: Synthetic peptide
  MOD_RES (26): Unknown amino acid
FPENFYDWFDRQVSGGSGGGASLFGXGSG

SEQ ID NO: 1540 - protein, 29 aa, Artificial Sequence
  Description of Artificial Sequence: Synthetic peptide
  MOD_RES (26): Unknown amino acid
FHDNFYDWFDRQVSGGSGGSGSPFGXRSD

SEQ ID NO: 1541 - protein, 23 aa, Artificial Sequence
  Description of Artificial Sequence: Synthetic peptide
DYKDLCQSWGVRIGWLAGLCPKK

SEQ ID NO: 1542 - protein, 17 aa, Artificial Sequence
  Description of Artificial Sequence: Synthetic peptide
LCQSWGVRIGWLAGLCP

SEQ ID NO: 1543 - protein, 8 aa, Artificial Sequence
  Description of Artificial Sequence: Synthetic peptide
  MOD_RES (2): Pro, Gly, Ser, Arg, Ala or Leu; preferably Pro
  MOD_RES (5): Any amino acid; preferably a charged or aromatic amino acid
  MOD_RES (7): Hydrophobic amino acid; preferably Leu or Phe
  MOD_RES (8): Any amino acid; preferably a small amino acid
WXGYXWXX

SEQ ID NO: 1544 - protein, 5 aa, Artificial Sequence
  Description of Artificial Sequence: Synthetic peptide
  MOD_RES (3): Any amino acid
FYXWF

SEQ ID NO: 1545 - protein, 4 aa, Artificial Sequence
  Description of Artificial Sequence: Synthetic peptide
DYKD

SEQ ID NO: 1546 - protein, 6 aa, Artificial Sequence
  Description of Artificial Sequence: Synthetic peptide
AAAGAP

SEQ ID NO: 1547 - protein, 8 aa, Artificial Sequence
  Description of Artificial Sequence: Synthetic peptide
DYKDDDDK

SEQ ID NO: 1548 - protein, 20 aa, Artificial Sequence
  Description of Artificial Sequence: Synthetic peptide
  MOD_RES (14): Tyr or Trp
SLEEEWAQIQCEIXGRGCRY

SEQ ID NO: 1549 - protein, 7 aa, Artificial Sequence
  Description of Artificial Sequence: Synthetic peptide
  MOD_RES (2): Ala or Glu
  MOD_RES (7): Phe or Leu
WXGYEWX

SEQ ID NO: 1550 - protein, 21 aa, Artificial Sequence
  Description of Artificial Sequence: Synthetic peptide
CWARPCGDAANFYDWFVQQAS

SEQ ID NO: 1551 - protein, 12 aa, Artificial Sequence
  Description of Artificial Sequence: Synthetic peptide
SAKNFYDWFVKK

SEQ ID NO: 1552 - protein, 19 aa, Artificial Sequence
  Description of Artificial Sequence: Synthetic peptide
PPWGARFYDAIEQLVFDNL

SEQ ID NO: 1553 - protein, 18 aa, Artificial Sequence
  Description of Artificial Sequence: Synthetic peptide
VMDARDDPFYHKLSELVT

SEQ ID NO: 1554 - protein, 5 aa, Artificial Sequence
  Description of Artificial Sequence: Synthetic peptide
FYDWF

SEQ ID NO: 1555 - protein, 5 aa, Artificial Sequence
  Description of Artificial Sequence: Synthetic peptide
FYEWF

SEQ ID NO: 1556 - protein, 16 aa, Artificial Sequence
  Description of Artificial Sequence: Synthetic peptide
FHENFYDWFVRQVSKK

SEQ ID NO: 1557 - protein, 14 aa, Artificial Sequence
  Description of Artificial Sequence: Synthetic peptide
FHENFYDWFVRQVS

SEQ ID NO: 1558 - protein, 18 aa, Artificial Sequence
  Description of Artificial Sequence: Synthetic peptide
GSLDESFYDWFERQLGKK

SEQ ID NO: 1559 - protein, 16 aa, Artificial Sequence
  Description of Artificial Sequence: Synthetic peptide
GSLDESFYDWFERQLG

SEQ ID NO: 1560 - protein, 21 aa, Artificial Sequence
  Description of Artificial Sequence: Synthetic peptide
GRVDWLQRNANFYDWFVAELG

SEQ ID NO: 1561 - protein, 16 aa, Artificial Sequence
  Description of Artificial Sequence: Synthetic peptide
GLADEDFYEWFERQLR

SEQ ID NO: 1562 - protein, 16 aa, Artificial Sequence
  Description of Artificial Sequence: Synthetic peptide
GLADELFYEWFDRQLS

SEQ ID NO: 1563 - protein, 16 aa, Artificial Sequence
  Description of Artificial Sequence: Synthetic peptide
GQLDEDFYEWFDRQLS

SEQ ID NO: 1564 - protein, 16 aa, Artificial Sequence
  Description of Artificial Sequence: Synthetic peptide
GQLDEDFYAWFDRQLS

SEQ ID NO: 1565 - protein, 16 aa, Artificial Sequence
  Description of Artificial Sequence: Synthetic peptide
GFMDESFYEWFERQLR

SEQ ID NO: 1566 - protein, 16 aa, Artificial Sequence
  Description of Artificial Sequence: Synthetic peptide
GFWDESFYAWFERQLR

SEQ ID NO: 1567 - protein, 16 aa, Artificial Sequence
  Description of Artificial Sequence: Synthetic peptide
GFMDESFYAWFERQLR

SEQ ID NO: 1568 - protein, 16 aa, Artificial Sequence
  Description of Artificial Sequence: Synthetic peptide
GFWDESFYEWFERQLR

SEQ ID NO: 1569 - protein, 8 aa, Artificial Sequence
  Description of Artificial Sequence: Synthetic peptide
  MOD_RES (3)..(4): Any amino acid
  MOD_RES (6)..(7): Any amino acid
FYXXLXXL

SEQ ID NO: 1570 - protein, 8 aa, Artificial Sequence
  Description of Artificial Sequence: Synthetic peptide
  MOD_RES (3)..(4): Any amino acid
  MOD_RES (6)..(7): Any amino acid
FYXXIXXL

SEQ ID NO: 1571 - protein, 8 aa, Artificial Sequence
  Description of Artificial Sequence: Synthetic peptide
  MOD_RES (3): Any amino acid
  MOD_RES (6)..(7): Any amino acid
FYXAIXXL

SEQ ID NO: 1572 - protein, 8 aa, Artificial Sequence
  Description of Artificial Sequence: Synthetic peptide
  MOD_RES (3): Any amino acid
  MOD_RES (6)..(7): Any amino acid
FYXYFXXL

SEQ ID NO: 1573 - protein, 8 aa, Artificial Sequence
  Description of Artificial Sequence: Synthetic peptide
  MOD_RES (3): Any amino acid
  MOD_RES (6)..(7): Any amino acid
FYXYFXXL

SEQ ID NO: 1574 - protein, 16 aa, Artificial Sequence
  Description of Artificial Sequence: Synthetic peptide
  MOD_RES (1)..(4): Any amino acid which allows for binding to IR or IGF-1R
  MOD_RES (7): Any amino acid
  MOD_RES (10)..(11): Any amino acid
  MOD_RES (13)..(16): Any amino acid which allows for binding to IR or IGF-1R
XXXXFYXYFXXLXXXX

SEQ ID NO: 1575 - protein, 20 aa, Artificial Sequence
  Description of Artificial Sequence: Synthetic peptide
  MOD_RES (1): Any amino acid
  MOD_RES (4)..(5): Any amino acid
  MOD_RES (7)..(9): Any amino acid
  MOD_RES (12)..(17): Any amino acid
  MOD_RES (19)..(20): Any amino acid
XLCXXEXXXWGXXXXXXCXX

SEQ ID NO: 1576 - protein, 20 aa, Artificial Sequence
  Description of Artificial Sequence: Synthetic peptide
HLCVLEELFWGASLFGYCSG

SEQ ID NO: 1577 - protein, 20 aa, Artificial Sequence
  Description of Artificial Sequence: Synthetic peptide
  MOD_RES (1)..(4): Any amino acid
  MOD_RES (8): Any hydrophobic amino acid
  MOD_RES (12): Any amino acid
  MOD_RES (13): Any hydrophobic amino acid
  MOD_RES (14)..(15): Any amino acid
  MOD_RES (17): Any amino acid
  MOD_RES (19)..(20): Any amino acid
XXXXLCEXFGGXXXXGXCXX

SEQ ID NO: 1578 - protein, 20 aa, Artificial Sequence
  Description of Artificial Sequence: Synthetic peptide
  MOD_RES (1): Any amino acid
  MOD_RES (3): Any polar amino acid; preferably Asp or Glu
  MOD_RES (4): Any amino acid
  MOD_RES (5): Any amino acid; strong preference for Glu
  MOD_RES (7)..(8): Any amino acid
  MOD_RES (9): Any amino acid; preferaby Val, Ile, Leu or Met
  MOD_RES (10): Any amino acid
  MOD_RES (12): Any amino acid
  MOD_RES (13): Any amino acid; preferably Val, Ile, Leu or Met
  MOD_RES (14): Any aromatic amino acid
  MOD_RES (15)..(17): Any amino acid
  MOD_RES (19)..(20): Any amino acid
XLXXXWXXXXCXXXXXXCXX

SEQ ID NO: 1579 - protein, 23 aa, Artificial Sequence
  Description of Artificial Sequence: Synthetic peptide
KWLDQEWAWVQCEVYGRGCPSKK

SEQ ID NO: 1580 - protein, 21 aa, Artificial Sequence
  Description of Artificial Sequence: Synthetic peptide
KWLDQEWAWVQCEVYGRGCPS

SEQ ID NO: 1581 - protein, 20 aa, Artificial Sequence
  Description of Artificial Sequence: Synthetic peptide
SLEEEWAQIQCEIYGRGCRY

SEQ ID NO: 1582 - protein, 20 aa, Artificial Sequence
  Description of Artificial Sequence: Synthetic peptide
SLEEEWAQIQCEIWGRGCRY

SEQ ID NO: 1583 - protein, 20 aa, Artificial Sequence
  Description of Artificial Sequence: Synthetic peptide
SLEEEWAQIECEVYGRGCPS

SEQ ID NO: 1584 - protein, 20 aa, Artificial Sequence
  Description of Artificial Sequence: Synthetic peptide
SLEEEWAQIECEVWGRGCPS

SEQ ID NO: 1585 - protein, 12 aa, Artificial Sequence
  Description of Artificial Sequence: Synthetic peptide
  MOD_RES (6): Any amino acid; preferably a polar amino acid
  MOD_RES (8)..(10): Any amino acid
HPPLSXLXXXLL

SEQ ID NO: 1586 - protein, 5 aa, Artificial Sequence
  Description of Artificial Sequence: Synthetic peptide
WPTYW

SEQ ID NO: 1587 - protein, 11 aa, Artificial Sequence
  Description of Artificial Sequence: Synthetic peptide
ACVWPTYWNCG

SEQ ID NO: 1588 - protein, 4 aa, Artificial Sequence
  Description of Artificial Sequence: Synthetic peptide
WPGY

SEQ ID NO: 1589 - protein, 23 aa, Artificial Sequence
  Description of Artificial Sequence: Synthetic peptide
KVRGFQGGTVWPGYEWLRNAAKK

SEQ ID NO: 1590 - protein, 21 aa, Artificial Sequence
  Description of Artificial Sequence: Synthetic peptide
KVRGFQGGTVWPGYEWLRNAA

SEQ ID NO: 1591 - protein, 7 aa, Artificial Sequence
  Description of Artificial Sequence: Synthetic peptide
WAGYEWF

SEQ ID NO: 1592 - protein, 7 aa, Artificial Sequence
  Description of Artificial Sequence: Synthetic peptide
WEGYEWL

SEQ ID NO: 1593 - protein, 7 aa, Artificial Sequence
  Description of Artificial Sequence: Synthetic peptide
WAGYEWL

SEQ ID NO: 1594 - protein, 7 aa, Artificial Sequence
  Description of Artificial Sequence: Synthetic peptide
WEGYEWF

SEQ ID NO: 1595 - protein, 15 aa, Artificial Sequence
  Description of Artificial Sequence: Synthetic peptide
DSDWAGYEWFEEQLD

SEQ ID NO: 1596 - protein, 5 aa, Artificial Sequence
  Description of Artificial Sequence: Synthetic peptide
  MOD_RES (3): Any amino acid
FYXWF

SEQ ID NO: 1597 - protein, 4 aa, Artificial Sequence
  Description of Artificial Sequence: Synthetic peptide
VYGR

SEQ ID NO: 1598 - protein, 4 aa, Artificial Sequence
  Description of Artificial Sequence: Synthetic peptide
EQLD

SEQ ID NO: 1599 - protein, 39 aa, Artificial Sequence; identical to SEQ ID NO: 214
  Description of Artificial Sequence: Synthetic peptide

SEQ ID NO: 1600 - protein, 26 aa, Artificial Sequence
  Description of Artificial Sequence: Synthetic peptide
GIISQSCPESFYDWFAGQVSDPWWCW

SEQ ID NO: 1601 - protein, 26 aa, Artificial Sequence
  Description of Artificial Sequence: Synthetic peptide
VGRASGFPENFYDWFGRQLSLQSGEQ

SEQ ID NO: 1602 - protein, 38 aa, Artificial Sequence
  Description of Artificial Sequence: Synthetic peptide
YRGMLVLGRISDGAGVASEPPARIGRKVFAVNFYDWFV

SEQ ID NO: 1603 - protein, 39 aa, Artificial Sequence; identical to SEQ ID NO: 216
  Description of Artificial Sequence: Synthetic peptide

SEQ ID NO: 1604 - protein, 26 aa, Artificial Sequence
  Description of Artificial Sequence: Synthetic peptide
VGYQGQGDENFYDWFIRQVSGRLGVQ

SEQ ID NO: 1605 - protein, 26 aa, Artificial Sequence
  Description of Artificial Sequence: Synthetic peptide
SACQFDCHENFYDWFARQVSGGAAYG

SEQ ID NO: 1606 - protein, 26 aa, Artificial Sequence
  Description of Artificial Sequence: Synthetic peptide
SAAQLFFQESFYDWFLRQVAESSQPN

SEQ ID NO: 1607 - protein, 26 aa, Artificial Sequence
  Description of Artificial Sequence: Synthetic peptide
AVRATRFDEAFYDWFVRQISDGQGNK

SEQ ID NO: 1608 - protein, 26 aa, Artificial Sequence
  Description of Artificial Sequence: Synthetic peptide
VNQSGSIHENFYDWFERQVSHQRGVR

SEQ ID NO: 1609 - protein, 26 aa, Artificial Sequence
  Description of Artificial Sequence: Synthetic peptide
APDPSDFQEIFYDWFVRQVSRMPGGG

SEQ ID NO: 1610 - protein, 25 aa, Artificial Sequence
  Description of Artificial Sequence: Synthetic peptide
SSCDGAGHESFYEWFVRQVSGCRSV

SEQ ID NO: 1611 - protein, 26 aa, Artificial Sequence
  Description of Artificial Sequence: Synthetic peptide
RAGSSDFHEDFYEWFVRQVSLSLKGK

SEQ ID NO: 1612 - protein, 26 aa, Artificial Sequence
  Description of Artificial Sequence: Synthetic peptide
QAVQPGFHEEFYDWFVRQVSTGVGGG

SEQ ID NO: 1613 - protein, 16 aa, Artificial Sequence
  Description of Artificial Sequence: Synthetic peptide
GFREGNFYEWFQAQVT

SEQ ID NO: 1614 - protein, 26 aa, Artificial Sequence
  Description of Artificial Sequence: Synthetic peptide
SSIGGGFHENFYDWFSRQLSQSPPLK

SEQ ID NO: 1615 - protein, 26 aa, Artificial Sequence
  Description of Artificial Sequence: Synthetic peptide
QSPVGSSHEDFYDWFFRQVAQSGAHQ

SEQ ID NO: 1616 - protein, 26 aa, Artificial Sequence
  Description of Artificial Sequence: Synthetic peptide
NYRRQVFNGNFYDWFDRQVFSLVTPG

SEQ ID NO: 1617 - protein, 26 aa, Artificial Sequence
  Description of Artificial Sequence: Synthetic peptide
TLDGGSFEEQFYDWFVRQLSYRTNPD

SEQ ID NO: 1618 - protein, 26 aa, Artificial Sequence
  Description of Artificial Sequence: Synthetic peptide
FYVQQWGHENFYDWFDRQVSQSGGAG

SEQ ID NO: 1619 - protein, 26 aa, Artificial Sequence
  Description of Artificial Sequence: Synthetic peptide
LRRQAPVEENFYDWFVRQVSGDRVGG

SEQ ID NO: 1620 - protein, 26 aa, Artificial Sequence
  Description of Artificial Sequence: Synthetic peptide
RCGRELYHSTFYDWFDRQVAGRTCPS

SEQ ID NO: 1621 - protein, 26 aa, Artificial Sequence
  Description of Artificial Sequence: Synthetic peptide
CCLLCRFQQNFYDWFVCQGISRLRPL

SEQ ID NO: 1622 - protein, 26 aa, Artificial Sequence
  Description of Artificial Sequence: Synthetic peptide
PPLASDLDVQFYGWFVQQVSPPGRGG

SEQ ID NO: 1623 - protein, 25 aa, Artificial Sequence
  Description of Artificial Sequence: Synthetic peptide
GAPVDQLHEDFYDWFVRQVSQAATG

SEQ ID NO: 1624 - protein, 16 aa, Artificial Sequence
  Description of Artificial Sequence: Synthetic peptide
GFREGSFYDWFQAQVT

SEQ ID NO: 1625 - protein, 21 aa, Artificial Sequence
  Description of Artificial Sequence: Synthetic peptide
SQAGSAFYAWFDQVLRTVHSA

SEQ ID NO: 1626 - protein, 26 aa, Artificial Sequence
  Description of Artificial Sequence: Synthetic peptide
RGAVAGFHDQFYDWFDRQVSRVHKFG

SEQ ID NO: 1627 - protein, 26 aa, Artificial Sequence
  Description of Artificial Sequence: Synthetic peptide
AICDAGFHEHFYDWFALQVSDCGRQS

SEQ ID NO: 1628 - protein, 26 aa, Artificial Sequence
  Description of Artificial Sequence: Synthetic peptide
LGYQEPFQQNFYDWFVRQVSGAENAG

SEQ ID NO: 1629 - protein, 21 aa, Artificial Sequence
  Description of Artificial Sequence: Synthetic peptide
EAASLGSQDRNFYDWFVRQVV

SEQ ID NO: 1630 - protein, 21 aa, Artificial Sequence
  Description of Artificial Sequence: Synthetic peptide
VERSASSQDGNFYDWFVVQIR

SEQ ID NO: 1631 - protein, 21 aa, Artificial Sequence
  Description of Artificial Sequence: Synthetic peptide
TSEVQRRSQDNFYDWFVAQVA

SEQ ID NO: 1632 - protein, 26 aa, Artificial Sequence
  Description of Artificial Sequence: Synthetic peptide
HLADGQFHEKFYDWFERQISSRCNDC

SEQ ID NO: 1633 - protein, 26 aa, Artificial Sequence
  Description of Artificial Sequence: Synthetic peptide
FRTLAAQHDSFYDWFDRQVSGAAGER

SEQ ID NO: 1634 - protein, 20 aa, Artificial Sequence
  Description of Artificial Sequence: Synthetic peptide
SFHEDFYDWFDRQVSGSLKK

SEQ ID NO: 1635 - protein, 25 aa, Artificial Sequence
  Description of Artificial Sequence: Synthetic peptide
TFYSCLASLLTGTPQPNRGPWERCR

SEQ ID NO: 1636 - protein, 25 aa, Artificial Sequence
  Description of Artificial Sequence: Synthetic peptide
FFYDCLAALLQGVARYHDLCAVEIT

SEQ ID NO: 1637 - protein, 27 aa, Artificial Sequence
  Description of Artificial Sequence: Synthetic peptide
CCTTEMVVMDARDDPFYHKLSELVTGG

SEQ ID NO: 1638 - protein, 20 aa, Artificial Sequence
  Description of Artificial Sequence: Synthetic peptide
RGQSDAFYSGLWALIGLSDG

SEQ ID NO: 1639 - protein, 21 aa, Artificial Sequence
  Description of Artificial Sequence: Synthetic peptide
GVRAMSFYDALVSVLGLGPSG

SEQ ID NO: 1640 - protein, 20 aa, Artificial Sequence
  Description of Artificial Sequence: Synthetic peptide
RLFYCGIQALGANLGYSGCV

SEQ ID NO: 1641 - protein, 21 aa, Artificial Sequence
  Description of Artificial Sequence: Synthetic peptide
LQPCSGFYECIERLIGVKLSG

SEQ ID NO: 1642 - protein, 17 aa, Artificial Sequence
  Description of Artificial Sequence: Synthetic peptide
LKDGFYDYFWQRLHLGS

SEQ ID NO: 1643 - protein, 21 aa, Artificial Sequence
  Description of Artificial Sequence: Synthetic peptide
VEGRGLFYDLLRQLLARRQNG

SEQ ID NO: 1644 - protein, 27 aa, Artificial Sequence
  Description of Artificial Sequence: Synthetic peptide
RGCNDDGGKGWSDDPFYHKLSELICGG

SEQ ID NO: 1645 - protein, 21 aa, Artificial Sequence
  Description of Artificial Sequence: Synthetic peptide
QGGSASFYDAIDRLLRMRIGG

SEQ ID NO: 1646 - protein, 27 aa, Artificial Sequence
  Description of Artificial Sequence: Synthetic peptide
RCEEKQAEVGPSSDPFYHKMSELLGCR

SEQ ID NO: 1647 - protein, 25 aa, Artificial Sequence
  Description of Artificial Sequence: Synthetic peptide
DRDFCRFYERLTALVGGQVDGGWPC

SEQ ID NO: 1648 - protein, 21 aa, Artificial Sequence
  Description of Artificial Sequence: Synthetic peptide
KLHNLMFYYGLQRLVWGAGLG

SEQ ID NO: 1649 - protein, 21 aa, Artificial Sequence
  Description of Artificial Sequence: Synthetic peptide
GNGDGMFYQLLSLLVGRDMHV

SEQ ID NO: 1650 - protein, 25 aa, Artificial Sequence
  Description of Artificial Sequence: Synthetic peptide
SSYGCDGFYLMLFSLGLVASQELEC

SEQ ID NO: 1651 - protein, 21 aa, Artificial Sequence
  Description of Artificial Sequence: Synthetic peptide
PDLHKGFYAQLAQLIRGQLLS

SEQ ID NO: 1652 - protein, 20 aa, Artificial Sequence
  Description of Artificial Sequence: Synthetic peptide
FYDAIDQLVRGSARAGGTRD

SEQ ID NO: 1653 - protein, 21 aa, Artificial Sequence
  Description of Artificial Sequence: Synthetic peptide
YSCGDGFYSLLSDLLGGQFRC

SEQ ID NO: 1654 - protein, 27 aa, Artificial Sequence
  Description of Artificial Sequence: Synthetic peptide
RGMKEEVLVGGSTDPFYHKLSELLQGS

SEQ ID NO: 1655 - protein, 21 aa, Artificial Sequence
  Description of Artificial Sequence: Synthetic peptide
IQQELTFYDLLHRLVRSELGS

SEQ ID NO: 1656 - protein, 21 aa, Artificial Sequence
  Description of Artificial Sequence: Synthetic peptide
GGTEVDFYRALERLVRGQLGL

SEQ ID NO: 1657 - protein, 20 aa, Artificial Sequence
  Description of Artificial Sequence: Synthetic peptide
LRIANLFYQRLWDLAFGGGG

SEQ ID NO: 1658 - protein, 26 aa, Artificial Sequence
  Description of Artificial Sequence: Synthetic peptide
  MOD_RES (6): Unknown amino acid; translation read-through at TGA stop codon
RCGRWXAEMGAGDDPFYHKLSELVCG

SEQ ID NO: 1659 - protein, 20 aa, Artificial Sequence
  Description of Artificial Sequence: Synthetic peptide
DRAFYNGLRDLVGAVYGAWD

SEQ ID NO: 1660 - protein, 21 aa, Artificial Sequence
  Description of Artificial Sequence: Synthetic peptide
PVGVQGFYEGLSRLVLGRGGW

SEQ ID NO: 1661 - protein, 21 aa, Artificial Sequence
  Description of Artificial Sequence: Synthetic peptide
RFSTDGFYQYLLALVGGGPVG

SEQ ID NO: 1662 - protein, 21 aa, Artificial Sequence
  Description of Artificial Sequence: Synthetic peptide
NSRDGGFYLQLERLLGFPVTG

SEQ ID NO: 1663 - protein, 21 aa, Artificial Sequence
  Description of Artificial Sequence: Synthetic peptide
  MOD_RES (18): Unknown amino acid
VVTPVNFYRALEALVRGXRLG

SEQ ID NO: 1664 - protein, 21 aa, Artificial Sequence
  Description of Artificial Sequence: Synthetic peptide
QPAPDGFYSALMKLIGRGGVS

SEQ ID NO: 1665 - protein, 21 aa, Artificial Sequence
  Description of Artificial Sequence: Synthetic peptide
PGTDLGFYQALRCVVIQGACD

SEQ ID NO: 1666 - protein, 21 aa, Artificial Sequence
  Description of Artificial Sequence: Synthetic peptide
AQPCGGFYGLLEQLVGRSVCD

SEQ ID NO: 1667 - protein, 21 aa, Artificial Sequence
  Description of Artificial Sequence: Synthetic peptide
QPDHSYFYSLLQELVGSEERL

SEQ ID NO: 1668 - protein, 25 aa, Artificial Sequence
  Description of Artificial Sequence: Synthetic peptide
QFYGCLLDLSLGVPSFGWRRRCITA

SEQ ID NO: 1669 - protein, 21 aa, Artificial Sequence
  Description of Artificial Sequence: Synthetic peptide
LGVTDGFYAALGYLIHGVGQF

SEQ ID NO: 1670 - protein, 21 aa, Artificial Sequence
  Description of Artificial Sequence: Synthetic peptide
  MOD_RES (4): Unknown amino acid
CMMXDGFYAGLGCLLTAGEGR

SEQ ID NO: 1671 - protein, 21 aa, Artificial Sequence
  Description of Artificial Sequence: Synthetic peptide
ICTGQGFYQVLCGLLRGTSAR

SEQ ID NO: 1672 - protein, 21 aa, Artificial Sequence
  Description of Artificial Sequence: Synthetic peptide
QGNVLDFYGWIGRLLAKQGSD

SEQ ID NO: 1673 - protein, 21 aa, Artificial Sequence
  Description of Artificial Sequence: Synthetic peptide
VATSQGFYSGLSELLQGGGNV

SEQ ID NO: 1674 - protein, 21 aa, Artificial Sequence
  Description of Artificial Sequence: Synthetic peptide
IWATGDFYRLLSQLVMGRVGT

SEQ ID NO: 1675 - protein, 17 aa, Artificial Sequence
  Description of Artificial Sequence: Synthetic peptide
EGSGFYGYFFSLLGLQG

SEQ ID NO: 1676 - protein, 21 aa, Artificial Sequence
  Description of Artificial Sequence: Synthetic peptide
RQGTGSFYLMLEQLLVGARGP

SEQ ID NO: 1677 - protein, 21 aa, Artificial Sequence
  Description of Artificial Sequence: Synthetic peptide
DSVGDNFYQLLESLVGGHGVG

SEQ ID NO: 1678 - protein, 30 aa, Artificial Sequence
  Description of Artificial Sequence: Synthetic peptide
RGIVAMVEATEVGSDHDPFYHKLSELVQGS

SEQ ID NO: 1679 - protein, 21 aa, Artificial Sequence
  Description of Artificial Sequence: Synthetic peptide
LSSDGQFYRALNLLLQGSAGR

SEQ ID NO: 1680 - protein, 21 aa, Artificial Sequence
  Description of Artificial Sequence: Synthetic peptide
ASSASGFYELLQRLAGLGLEV

SEQ ID NO: 1681 - protein, 25 aa, Artificial Sequence
  Description of Artificial Sequence: Synthetic peptide
FFYRCLSRLLGGQLGSRLGLSCIGD

SEQ ID NO: 1682 - protein, 17 aa, Artificial Sequence
  Description of Artificial Sequence: Synthetic peptide
IIGGFYSYFNSVLRLGT

SEQ ID NO: 1683 - protein, 21 aa, Artificial Sequence
  Description of Artificial Sequence: Synthetic peptide
PAGPCGFYCGLGLLLHGDQSP

SEQ ID NO: 1684 - protein, 21 aa, Artificial Sequence
  Description of Artificial Sequence: Synthetic peptide
RCQGTGFYTCIQELIGFGDPD

SEQ ID NO: 1685 - protein, 27 aa, Artificial Sequence
  Description of Artificial Sequence: Synthetic peptide
SGAKVIVVTGDSGDPFYHKLSELLQGS

SEQ ID NO: 1686 - protein, 21 aa, Artificial Sequence
  Description of Artificial Sequence: Synthetic peptide
VGTVAGFYDAIAQLVARASRV

SEQ ID NO: 1687 - protein, 21 aa, Artificial Sequence
  Description of Artificial Sequence: Synthetic peptide
TLRSPTFYDWLEMVLTHGQGG

SEQ ID NO: 1688 - protein, 17 aa, Artificial Sequence
  Description of Artificial Sequence: Synthetic peptide
RFDPFYSYFVNLLGASA

SEQ ID NO: 1689 - protein, 27 aa, Artificial Sequence
  Description of Artificial Sequence: Synthetic peptide
RGKTAAVIVGRPADPFYHKLSELLQGG

SEQ ID NO: 1690 - protein, 27 aa, Artificial Sequence
  Description of Artificial Sequence: Synthetic peptide
GCVVEWQKWHGASDPFYHKLSELGGCS

SEQ ID NO: 1691 - protein, 27 aa, Artificial Sequence
  Description of Artificial Sequence: Synthetic peptide
GRTMAVMAAGGPDDPFYHKLSELVQGG

SEQ ID NO: 1692 - protein, 27 aa, Artificial Sequence
  Description of Artificial Sequence: Synthetic peptide
GCAVVEEAERSRGDPFYHKLSELIQGC

SEQ ID NO: 1693 - protein, 26 aa, Artificial Sequence
  Description of Artificial Sequence: Synthetic peptide
GCEVIVEEGDSADPFYHKLSELCQGS

SEQ ID NO: 1694 - protein, 21 aa, Artificial Sequence
  Description of Artificial Sequence: Synthetic peptide
MMVVDGFYDALHQLVVAQSLG

SEQ ID NO: 1695 - protein, 21 aa, Artificial Sequence
  Description of Artificial Sequence: Synthetic peptide
LSVALSFYDALGQLVAGEGRW

SEQ ID NO: 1696 - protein, 27 aa, Artificial Sequence
  Description of Artificial Sequence: Synthetic peptide
GGTKAVAKVGTRDDPFYHKLSELLQGS

SEQ ID NO: 1697 - protein, 40 aa, Artificial Sequence
  Description of Artificial Sequence: Synthetic peptide
AETSVQVGWIRLQSVWPGEHWNTVDPFYHKLSELLRGSGA

SEQ ID NO: 1698 - protein, 27 aa, Artificial Sequence
  Description of Artificial Sequence: Synthetic peptide
SRAKVEAEMPDSGDPFYHKLSELLASG

SEQ ID NO: 1699 - protein, 27 aa, Artificial Sequence
  Description of Artificial Sequence: Synthetic peptide
SRVAATKEKRPSDDPFYHKLSELLQGS

SEQ ID NO: 1700 - protein, 27 aa, Artificial Sequence
  Description of Artificial Sequence: Synthetic peptide
SSETAKMVTGTRDDPFYHKLSELVQGS

SEQ ID NO: 1701 - protein, 24 aa, Artificial Sequence
  Description of Artificial Sequence: Synthetic peptide
GCITAENGAGDPFYHKLSELGGCS

SEQ ID NO: 1702 - protein, 28 aa, Artificial Sequence
  Description of Artificial Sequence: Synthetic peptide
RCGDEEGWQENRRDDPFYHKLSELFGGC

SEQ ID NO: 1703 - protein, 21 aa, Artificial Sequence
  Description of Artificial Sequence: Synthetic peptide
MNVFVSFYDAIDQLVCQRIGC

SEQ ID NO: 1704 - protein, 21 aa, Artificial Sequence
  Description of Artificial Sequence: Synthetic peptide
QSGSGDFYDWLSRLIRGNGDG

SEQ ID NO: 1705 - protein, 24 aa, Artificial Sequence
  Description of Artificial Sequence: Synthetic peptide
CGAKMTGTPNDPFYHKLSELLQRG

SEQ ID NO: 1706 - protein, 21 aa, Artificial Sequence
  Description of Artificial Sequence: Synthetic peptide
GHYFGSFYDAIDQLVAGMLPG

SEQ ID NO: 1707 - protein, 40 aa, Artificial Sequence
  Description of Artificial Sequence: Synthetic peptide
  MOD_RES (9): Unknown amino acid; translation read-through at TGA stop codon
AGTPAQVGXNRLWSVWPGEHWNTVDPFYNKLSELLRESGA

SEQ ID NO: 1708 - protein, 27 aa, Artificial Sequence
  Description of Artificial Sequence: Synthetic peptide
CSMAAVAEAGDDDDPFYHKLSELCQGS

SEQ ID NO: 1709 - protein, 40 aa, Artificial Sequence
  Description of Artificial Sequence: Synthetic peptide
  MOD_RES (30): Unknown amino acid; translation read-through at TGA stop codon
VDTPAQVGWNRLWSVGPGEHWYTDDPFYHXLSELLRESGA

SEQ ID NO: 1710 - protein, 40 aa, Artificial Sequence
  Description of Artificial Sequence: Synthetic peptide
AETSAQVGWQRLWSVWPGDHWSTLDPFYHKLSELLRESGA

SEQ ID NO: 1711 - protein, 21 aa, Artificial Sequence
  Description of Artificial Sequence: Synthetic peptide
AGSVTSFYDAMEQLVATGTSA

SEQ ID NO: 1712 - protein, 18 aa, Artificial Sequence
  Description of Artificial Sequence: Synthetic peptide
TDDGFYDALEQLVQGSKK

SEQ ID NO: 1713 - protein, 18 aa, Artificial Sequence
  Description of Artificial Sequence: Synthetic peptide
GSFYEALQRLVGGEQGKK

SEQ ID NO: 1714 - protein, 20 aa, Artificial Sequence
  Description of Artificial Sequence: Synthetic peptide
VRGFQGGTVWPGYEWLRNAA

SEQ ID NO: 1715 - protein, 40 aa, Artificial Sequence; identical to SEQ ID NO: 1109
  Description of Artificial Sequence: Synthetic peptide

SEQ ID NO: 1716 - protein, 39 aa, Artificial Sequence
  Description of Artificial Sequence: Synthetic peptide
GLDHSDAVGVHLGFAWPAQARGRWEAGGLEDTWAGYDWL

SEQ ID NO: 1717 - protein, 8 aa, Artificial Sequence
  Description of Artificial Sequence: Synthetic peptide
  MOD_RES (2): Unknown amino acid
WXGYAWLS

SEQ ID NO: 1718 - protein, 23 aa, Artificial Sequence
  Description of Artificial Sequence: Synthetic peptide
KRGGGTFYEWFESALRKHGAGKK

SEQ ID NO: 1719 - protein, 23 aa, Artificial Sequence
  Description of Artificial Sequence: Synthetic peptide
VTFTSAVFHENFYDWFVRQVSKK

SEQ ID NO: 1720 - protein, 21 aa, Artificial Sequence
  Description of Artificial Sequence: Synthetic peptide
NGVERAGTGDNFYDWFVAQLH

SEQ ID NO: 1721 - protein, 21 aa, Artificial Sequence
  Description of Artificial Sequence: Synthetic peptide
QSDSGTVHDRFYGWFRDTWAS

SEQ ID NO: 1722 - protein, 21 aa, Artificial Sequence
  Description of Artificial Sequence: Synthetic peptide
GRFYGWFQDAIDQLMPWGFDP

SEQ ID NO: 1723 - protein, 17 aa, Artificial Sequence
  Description of Artificial Sequence: Synthetic peptide
RYGRWGLAQQFYDWFDR

SEQ ID NO: 1724 - protein, 16 aa, Artificial Sequence
  Description of Artificial Sequence: Synthetic peptide
GFREGQRWYWFVAQVT

SEQ ID NO: 1725 - protein, 26 aa, Artificial Sequence
  Description of Artificial Sequence: Synthetic peptide
TYKARFLHENFYDWFNRQVSQYFGRV

SEQ ID NO: 1726 - protein, 21 aa, Artificial Sequence
  Description of Artificial Sequence: Synthetic peptide
WTDVDGFHSGFYRWFQNQWER

SEQ ID NO: 1727 - protein, 21 aa, Artificial Sequence
  Description of Artificial Sequence: Synthetic peptide
VASGHVLHGQFYRWFVDQFAL

SEQ ID NO: 1728 - protein, 21 aa, Artificial Sequence
  Description of Artificial Sequence: Synthetic peptide
QARVGNVHQQFYEWFREVMQG

SEQ ID NO: 1729 - protein, 21 aa, Artificial Sequence
  Description of Artificial Sequence: Synthetic peptide
TGHRLGLDEQFYWWFRDALSG

SEQ ID NO: 1730 - protein, 21 aa, Artificial Sequence
  Description of Artificial Sequence: Synthetic peptide
VGDFCVSHDCFYGWFLRESMQ

SEQ ID NO: 1731 - protein, 21 aa, Artificial Sequence
  Description of Artificial Sequence: Synthetic peptide
RMYFSTGAPQNFYDWFVQEWD

SEQ ID NO: 1732 - protein, 8 aa, Artificial Sequence
  Description of Artificial Sequence: Synthetic peptide
  MOD_RES (3)..(4): Unknown amino acid
  MOD_RES (6)..(7): Unknown amino acid
FYXXLXXL

SEQ ID NO: 1733 - protein, 23 aa, Artificial Sequence
  Description of Artificial Sequence: Synthetic peptide
KDRAFYNGLRDLVGAVYGAWDKK

SEQ ID NO: 1734 - protein, 26 aa, Artificial Sequence
  Description of Artificial Sequence: Synthetic peptide
DYKDFYDAIDQLVRGSARAGGTRDKK

SEQ ID NO: 1735 - protein, 21 aa, Artificial Sequence
  Description of Artificial Sequence: Synthetic peptide
EHWNTVDPFYFTLFEWLRESG

SEQ ID NO: 1736 - protein, 21 aa, Artificial Sequence
  Description of Artificial Sequence: Synthetic peptide
EHWNTVDPFYQYFSELLRESG

SEQ ID NO: 1737 - protein, 21 aa, Artificial Sequence
  Description of Artificial Sequence: Synthetic peptide
AGVNAGFYRYFSTLLDWWDQG

SEQ ID NO: 1738 - protein, 21 aa, Artificial Sequence
  Description of Artificial Sequence: Synthetic peptide
IQGWEPFYGWFDDVVAQMFEE

SEQ ID NO: 1739 - protein, 21 aa, Artificial Sequence
  Description of Artificial Sequence: Synthetic peptide
PPWGARFYDAIEQLVFDNLCC

SEQ ID NO: 1740 - protein, 17 aa, Artificial Sequence
  Description of Artificial Sequence: Synthetic peptide
RWPNFYGYFESLLTHFS

SEQ ID NO: 1741 - protein, 17 aa, Artificial Sequence
  Description of Artificial Sequence: Synthetic peptide
HYNAFYEYFQVLLAETW

SEQ ID NO: 1742 - protein, 21 aa, Artificial Sequence
  Description of Artificial Sequence: Synthetic peptide
IGRVRSFYDAIDKLFQSDWER

SEQ ID NO: 1743 - protein, 17 aa, Artificial Sequence
  Description of Artificial Sequence: Synthetic peptide
EGWDFYSYFSGLLASVT

SEQ ID NO: 1744 - protein, 21 aa, Artificial Sequence
  Description of Artificial Sequence: Synthetic peptide
SVKEVQFYRYFYDLLQSEESG

SEQ ID NO: 1745 - protein, 21 aa, Artificial Sequence
  Description of Artificial Sequence: Synthetic peptide
GNSGGSFYRYFQLLLDSDGMS

SEQ ID NO: 1746 - protein, 21 aa, Artificial Sequence
  Description of Artificial Sequence: Synthetic peptide
RDAGSSFYDAIDQLVCLTYFC

SEQ ID NO: 1747 - protein, 8 aa, Artificial Sequence
  Description of Artificial Sequence: Synthetic peptide
  MOD_RES (2)..(3): Unknown amino acid
  MOD_RES (5)..(6): Unknown amino acid
LXXLXXYF

SEQ ID NO: 1748 - protein, 17 aa, Artificial Sequence
  Description of Artificial Sequence: Synthetic peptide
LDALDRLMRYFEERPSL

SEQ ID NO: 1749 - protein, 20 aa, Artificial Sequence
  Description of Artificial Sequence: Synthetic peptide
PLAELWAYFEHSEQGRSSAH

SEQ ID NO: 1750 - protein, 17 aa, Artificial Sequence
  Description of Artificial Sequence: Synthetic peptide
LDPLDALLQYFWSVPGH

SEQ ID NO: 1751 - protein, 17 aa, Artificial Sequence
  Description of Artificial Sequence: Synthetic peptide
RGRLGSLSTQFYNWFAE

SEQ ID NO: 1752 - protein, 17 aa, Artificial Sequence
  Description of Artificial Sequence: Synthetic peptide
ADELEWLLDYFMHQPRP

SEQ ID NO: 1753 - protein, 17 aa, Artificial Sequence
  Description of Artificial Sequence: Synthetic peptide
DGVLEELFSYFSATVGP

SEQ ID NO: 1754 - protein, 7 aa, Artificial Sequence
  Description of Artificial Sequence: Synthetic peptide
  MOD_RES (3): Unknown amino acid
  MOD_RES (5): Unknown amino acid
WPXYXWL

SEQ ID NO: 1755 - protein, 20 aa, Artificial Sequence
  Description of Artificial Sequence: Synthetic peptide
WPGYLFFEEALQDWRGSTED

SEQ ID NO: 1756 - protein, 17 aa, Artificial Sequence
  Description of Artificial Sequence: Synthetic peptide
AAVHEQFYDWFADQYKK

SEQ ID NO: 1757 - protein, 17 aa, Artificial Sequence
  Description of Artificial Sequence: Synthetic peptide
QAPSNFYDWFVREWDKK

SEQ ID NO: 1758 - protein, 17 aa, Artificial Sequence
  Description of Artificial Sequence: Synthetic peptide
QSFYDYIEELLGGEWKK

SEQ ID NO: 1759 - protein, 17 aa, Artificial Sequence
  Description of Artificial Sequence: Synthetic peptide
DPFYQGLWEWLRESGKK

SEQ ID NO: 1760 - protein, 20 aa, Artificial Sequence
  Description of Artificial Sequence: Synthetic peptide
HLCVLEELFWGASLFGYCSG

SEQ ID NO: 1761 - protein, 20 aa, Artificial Sequence
  Description of Artificial Sequence: Synthetic peptide
FQSLLEELVWGAPLFRYGTG

SEQ ID NO: 1762 - protein, 20 aa, Artificial Sequence
  Description of Artificial Sequence: Synthetic peptide
PLCVLEELFWGASLFGYCSG

SEQ ID NO: 1763 - protein, 20 aa, Artificial Sequence
  Description of Artificial Sequence: Synthetic peptide
PLCVLEELFWGASLFGQCSG

SEQ ID NO: 1764 - protein, 20 aa, Artificial Sequence
  Description of Artificial Sequence: Synthetic peptide
HLCVLEELFWGASLFGQCSG

SEQ ID NO: 1765 - protein, 20 aa, Artificial Sequence
  Description of Artificial Sequence: Synthetic peptide
DLRVLCELFGGAYVLGYCSE

SEQ ID NO: 1766 - protein, 20 aa, Artificial Sequence
  Description of Artificial Sequence: Synthetic peptide
HRSVLKQLSWGASLFGQWAG

SEQ ID NO: 1767 - protein, 20 aa, Artificial Sequence
  Description of Artificial Sequence: Synthetic peptide
HLSVGEELSWWVALLGQWAR

SEQ ID NO: 1768 - protein, 20 aa, Artificial Sequence
  Description of Artificial Sequence: Synthetic peptide
APVSTEELRWGALLFGQWAG

SEQ ID NO: 1769 - protein, 23 aa, Artificial Sequence
  Description of Artificial Sequence: Synthetic peptide
KWLDQEWAWVQCEVYGRGCPSKK

SEQ ID NO: 1770 - protein, 20 aa, Artificial Sequence
  Description of Artificial Sequence: Synthetic peptide
QLEEEWAGVQCEVYGRECPS

SEQ ID NO: 1771 - protein, 20 aa, Artificial Sequence
  Description of Artificial Sequence: Synthetic peptide
ALEEEWAWVQVRSIRSGLPL

SEQ ID NO: 1772 - protein, 20 aa, Artificial Sequence
  Description of Artificial Sequence: Synthetic peptide
SLDQEWAWVQCEVYGRGCLS

SEQ ID NO: 1773 - protein, 20 aa, Artificial Sequence
  Description of Artificial Sequence: Synthetic peptide
WLEHEWAQIQCELYGRGCTY

SEQ ID NO: 1774 - protein, 20 aa, Artificial Sequence
  Description of Artificial Sequence: Synthetic peptide
GLEQGCPWVGLEVQCRGCPS

SEQ ID NO: 1775 - protein, 20 aa, Artificial Sequence
  Description of Artificial Sequence: Synthetic peptide
DLRVLCELFGGAYVLGYCSE

SEQ ID NO: 1776 - protein, 20 aa, Artificial Sequence
  Description of Artificial Sequence: Synthetic peptide
PLWGLCELFGGASLFGYCSS

SEQ ID NO: 1777 - protein, 12 aa, Artificial Sequence
  Description of Artificial Sequence: Synthetic peptide
GGSGGSGGSGGS

SEQ ID NO: 1778 - protein, 6 aa, Artificial Sequence
  Description of Artificial Sequence: Synthetic peptide
HHHHHH

SEQ ID NO: 1779 - protein, 8 aa, Artificial Sequence
  Description of Artificial Sequence: Synthetic peptide
DYKDDDDK

SEQ ID NO: 1780 - protein, 15 aa, Artificial Sequence
  Description of Artificial Sequence: Synthetic peptide
FHENFYDWFVRQVSK

SEQ ID NO: 1781 - protein, 24 aa, Artificial Sequence
  Description of Artificial Sequence: Synthetic peptide
DYKDFYDAIQLVRSARAGGTRDKK

SEQ ID NO: 1782 - protein, 18 aa, Artificial Sequence
  Description of Artificial Sequence: Synthetic peptide
FYDAIQLVRSARAGGTRD

SEQ ID NO: 1783 - protein, 27 aa, Artificial Sequence
  Description of Artificial Sequence: Synthetic peptide
DYKDVTFTSAVFHENFYDWFVRQVSKK

SEQ ID NO: 1784 - protein, 21 aa, Artificial Sequence
  Description of Artificial Sequence: Synthetic peptide
VTFTSAVFHENFYDWFVRQVS

SEQ ID NO: 1785 - protein, 4 aa, Artificial Sequence
  Description of Artificial Sequence: Synthetic peptide
GSLD

SEQ ID NO: 1786 - protein, 4 aa, Artificial Sequence
  Description of Artificial Sequence: Synthetic peptide
LGKK

SEQ ID NO: 1787 - protein, 15 aa, Artificial Sequence
  Description of Artificial Sequence: Synthetic peptide
GSLDESFYDWFERQL

SEQ ID NO: 1788 - protein, 14 aa, Artificial Sequence
  Description of Artificial Sequence: Synthetic peptide
GSLDESFYDWFERQ

SEQ ID NO: 1789 - protein, 13 aa, Artificial Sequence
  Description of Artificial Sequence: Synthetic peptide
GSLDESFYDWFER

SEQ ID NO: 1790 - protein, 11 aa, Artificial Sequence
  Description of Artificial Sequence: Synthetic peptide
ESFYDWFERQL

SEQ ID NO: 1791 - protein, 10 aa, Artificial Sequence
  Description of Artificial Sequence: Synthetic peptide
ESFYDWFERQ

SEQ ID NO: 1792 - protein, 38 aa, Artificial Sequence
  Description of Artificial Sequence: Synthetic peptide
  MOD_RES (19): Lig
  MOD_RES (38): Lig
GSLDESFYDWFERQLGKKXGSLDESFYDWFERQLGKKX

SEQ ID NO: 1793 - protein, 36 aa, Artificial Sequence
  Description of Artificial Sequence: Synthetic peptide
GSLDESFYDWFERQLGKKGSLDESFYDWFERQLGKK

SEQ ID NO: 1794 - protein, 12 aa, Artificial Sequence
  Description of Artificial Sequence: Synthetic peptide
ESFYDWFERQLG

SEQ ID NO: 1795 - protein, 26 aa, Artificial Sequence
  Description of Artificial Sequence: Synthetic peptide
ESFYDWFERQLGKESFYDWFERQLGK

SEQ ID NO: 1796 - protein, 24 aa, Artificial Sequence
  Description of Artificial Sequence: Synthetic peptide
ESFYDWFERQLGESFYDWFERQLG

SEQ ID NO: 1797 - protein, 16 aa, Artificial Sequence
  Description of Artificial Sequence: Synthetic peptide
FHENFYDWFVRQVAKK

SEQ ID NO: 1798 - protein, 16 aa, Artificial Sequence
  Description of Artificial Sequence: Synthetic peptide
FHENFYDWFVRQASKK

SEQ ID NO: 1799 - protein, 16 aa, Artificial Sequence
  Description of Artificial Sequence: Synthetic peptide
FHENFYDWFVRAVSKK

SEQ ID NO: 1800 - protein, 16 aa, Artificial Sequence
  Description of Artificial Sequence: Synthetic peptide
FHENFYDWFVAQVSKK

SEQ ID NO: 1801 - protein, 16 aa, Artificial Sequence
  Description of Artificial Sequence: Synthetic peptide
FHENFYDWFARQVSKK

SEQ ID NO: 1802 - protein, 16 aa, Artificial Sequence
  Description of Artificial Sequence: Synthetic peptide
FHEAFYDWFVRQVSKK

SEQ ID NO: 1803 - protein, 16 aa, Artificial Sequence
  Description of Artificial Sequence: Synthetic peptide
FHANFYDWFVRQVSKK

SEQ ID NO: 1804 - protein, 16 aa, Artificial Sequence
  Description of Artificial Sequence: Synthetic peptide
FAENFYDWFVRQVSKK

SEQ ID NO: 1805 - protein, 16 aa, Artificial Sequence
  Description of Artificial Sequence: Synthetic peptide
AHENFYDWFVRQVSKK

SEQ ID NO: 1806 - protein, 17 aa, Artificial Sequence
  Description of Artificial Sequence: Synthetic peptide
EFHENFYDWFVRQVSEE

SEQ ID NO: 1807 - protein, 16 aa, Artificial Sequence
  Description of Artificial Sequence: Synthetic peptide
FHENFYGWFVRQVSKK

SEQ ID NO: 1808 - protein, 13 aa, Artificial Sequence
  Description of Artificial Sequence: Synthetic peptide
HETFYSMIRSLAK

SEQ ID NO: 1809 - protein, 12 aa, Artificial Sequence
  Description of Artificial Sequence: Synthetic peptide
SDGFYNAIELLS

SEQ ID NO: 1810 - protein, 14 aa, Artificial Sequence
  Description of Artificial Sequence: Synthetic peptide
SLNFYDALQLLAKK

SEQ ID NO: 1811 - protein, 13 aa, Artificial Sequence
  Description of Artificial Sequence: Synthetic peptide
HDPFYSMMKSLLK

SEQ ID NO: 1812 - protein, 13 aa, Artificial Sequence
  Description of Artificial Sequence: Synthetic peptide
NSFYEALRMLSSK

SEQ ID NO: 1813 - protein, 13 aa, Artificial Sequence
  Description of Artificial Sequence: Synthetic peptide
HPTSKEIYAKLLK

SEQ ID NO: 1814 - protein, 13 aa, Artificial Sequence
  Description of Artificial Sequence: Synthetic peptide
HPSTNQMLMKLFK

SEQ ID NO: 1815 - protein, 14 aa, Artificial Sequence
  Description of Artificial Sequence: Synthetic peptide
HPPLSELKLFLIKK

SEQ ID NO: 1816 - protein, 12 aa, Artificial Sequence
  Description of Artificial Sequence: Synthetic peptide
WSDFYSYFQGLD

SEQ ID NO: 1817 - protein, 16 aa, Artificial Sequence
  Description of Artificial Sequence: Synthetic peptide
  SITE (16): This residue is chemically linked to the C-terminus of SEQ ID NO: 1818
FHENFYDWFVRQVSKK

SEQ ID NO: 1818 - protein, 17 aa, Artificial Sequence
  Description of Artificial Sequence: Synthetic peptide
  MOD_RES (1): Dap
XFHENFYDWFVRQVSKK

SEQ ID NO: 1819 - protein, 12 aa, Artificial Sequence
  Description of Artificial Sequence: Synthetic peptide
SSNFYQALMLLS

SEQ ID NO: 1820 - protein, 17 aa, Artificial Sequence
  Description of Artificial Sequence: Synthetic peptide
  MOD_RES (17): Lig
FHENFYDWFVRQVSKKX

SEQ ID NO: 1821 - protein, 15 aa, Artificial Sequence
  Description of Artificial Sequence: Synthetic peptide
HENFYGWFVRQVSKK

SEQ ID NO: 1822 - protein, 16 aa, Artificial Sequence
  Description of Artificial Sequence: Synthetic peptide
  SITE (16): This residue is chemically linked to the C-terminus of SEQ ID NO: 1823
FHENFYDWFVRQVSKK

SEQ ID NO: 1823 - protein, 17 aa, Artificial Sequence
  Description of Artificial Sequence: Synthetic peptide
KFHENFYDWFVRQVSKK

SEQ ID NO: 1824 - protein, 7 aa, Artificial Sequence
  Description of Artificial Sequence: Synthetic peptide
FYDWFKK

SEQ ID NO: 1825 - protein, 9 aa, Artificial Sequence
  Description of Artificial Sequence: Synthetic peptide
AFYDWFAKK

SEQ ID NO: 1826 - protein, 16 aa, Artificial Sequence
  Description of Artificial Sequence: Synthetic peptide
AAAAFYDWFAAAAAKK

SEQ ID NO: 1827 - protein, 17 aa, Artificial Sequence
  Description of Artificial Sequence: Synthetic peptide
  MOD_RES (1): Lig
  SITE (1): This residue is chemically linked to the N-terminus of SEQ ID NO: 1828
XFHENFYDWFVRQVSKK

SEQ ID NO: 1828 - protein, 17 aa, Artificial Sequence
  Description of Artificial Sequence: Synthetic peptide
  MOD_RES (1): Lig
XFHENFYDWFVRQVSKK

SEQ ID NO: 1829 - protein, 18 aa, Artificial Sequence
  Description of Artificial Sequence: Synthetic peptide
  SITE (1): This residue is chemically linked to the N-terminus of SEQ ID NO: 1830
CGFHENFYDWFVRQVSKK

SEQ ID NO: 1830 - protein, 18 aa, Artificial Sequence
  Description of Artificial Sequence: Synthetic peptide
CGFHENFYDWFVRQVSKK

SEQ ID NO: 1831 - protein, 18 aa, Artificial Sequence
  Description of Artificial Sequence: Synthetic peptide
CGFHENFYDWFVRQVSKK

SEQ ID NO: 1832 - protein, 17 aa, Artificial Sequence
  Description of Artificial Sequence: Synthetic peptide
  MOD_RES (1): Lig
  SITE (1): This residue is chemically linked to the N-terminus of SEQ ID NO: 1833
XFHENFYDWFVRQVSKK

SEQ ID NO: 1833 - protein, 17 aa, Artificial Sequence
  Description of Artificial Sequence: Synthetic peptide
  MOD_RES (1): Lig
XFHENFYDWFVRQVSKK

SEQ ID NO: 1834 - protein, 17 aa, Artificial Sequence
  Description of Artificial Sequence: Synthetic peptide
LDALDRLMRYFEERPSL

SEQ ID NO: 1835 - protein, 20 aa, Artificial Sequence
  Description of Artificial Sequence: Synthetic peptide
PLAELWAYFEHSEQGRSSAH

SEQ ID NO: 1836 - protein, 21 aa, Artificial Sequence
  Description of Artificial Sequence: Synthetic peptide
NGVERAGTGDNFYDWFVAQLH

SEQ ID NO: 1837 - protein, 21 aa, Artificial Sequence
  Description of Artificial Sequence: Synthetic peptide
EHWNTVDPFYFTLFEWLRESG

SEQ ID NO: 1838 - protein, 21 aa, Artificial Sequence
  Description of Artificial Sequence: Synthetic peptide
EHWNTVDPFYQYFSELLRESG

SEQ ID NO: 1839 - protein, 21 aa, Artificial Sequence
  Description of Artificial Sequence: Synthetic peptide
QSDSGTVHDRFYGWFRDTWAS

SEQ ID NO: 1840 - protein, 8 aa, Artificial Sequence
  Description of Artificial Sequence: Synthetic peptide
AFYDWFAK

SEQ ID NO: 1841 - protein, 7 aa, Artificial Sequence
  Description of Artificial Sequence: Synthetic peptide
AFYDWFA

SEQ ID NO: 1842 - protein, 6 aa, Artificial Sequence
  Description of Artificial Sequence: Synthetic peptide
AFYDWF

SEQ ID NO: 1843 - protein, 6 aa, Artificial Sequence
  Description of Artificial Sequence: Synthetic peptide
FYDWFA

SEQ ID NO: 1844 - protein, 5 aa, Artificial Sequence
  Description of Artificial Sequence: Synthetic peptide
FYDWF

SEQ ID NO: 1845 - protein, 9 aa, Artificial Sequence
  Description of Artificial Sequence: Synthetic peptide
AFYEWFAKK

SEQ ID NO: 1846 - protein, 9 aa, Artificial Sequence
  Description of Artificial Sequence: Synthetic peptide
AFYGWFAKK

SEQ ID NO: 1847 - protein, 9 aa, Artificial Sequence
  Description of Artificial Sequence: Synthetic peptide
AFYKWFAKK

SEQ ID NO: 1848 - protein, 13 aa, Artificial Sequence
  Description of Artificial Sequence: Synthetic peptide
  MOD_RES (13): Lig
  SITE (13): This residue is chemically linked to the C-terminus of SEQ ID NO: 1849
SDGFYNAIELLSX

SEQ ID NO: 1849 - protein, 13 aa, Artificial Sequence
  Description of Artificial Sequence: Synthetic peptide
  MOD_RES (13): Lig
SDGFYNAIELLSX

SEQ ID NO: 1850 - protein, 10 aa, Artificial Sequence
  Description of Artificial Sequence: Synthetic peptide
  MOD_RES (10): Lig
  SITE (10): This residue is chemically linked to the C-terminus of SEQ ID NO: 1851
AFYDWFAKKX

SEQ ID NO: 1851 - protein, 10 aa, Artificial Sequence
  Description of Artificial Sequence: Synthetic peptide
  MOD_RES (10): Lig
AFYDWFAKKX

SEQ ID NO: 1852 - protein, 16 aa, Artificial Sequence
  Description of Artificial Sequence: Synthetic peptide
FHENAYDWFVRQVSKK

SEQ ID NO: 1853 - protein, 16 aa, Artificial Sequence
  Description of Artificial Sequence: Synthetic peptide
FHENFADWFVRQVSKK

SEQ ID NO: 1854 - protein, 16 aa, Artificial Sequence
  Description of Artificial Sequence: Synthetic peptide
FHENFYAWFVRQVSKK

SEQ ID NO: 1855 - protein, 16 aa, Artificial Sequence
  Description of Artificial Sequence: Synthetic peptide
FHENFYDAFVRQVSKK

SEQ ID NO: 1856 - protein, 16 aa, Artificial Sequence
  Description of Artificial Sequence: Synthetic peptide
FHENFYDWAVRQVSKK

SEQ ID NO: 1857 - protein, 20 aa, Artificial Sequence
  Description of Artificial Sequence: Synthetic peptide
QLEEEWAGVQCEVYGRECPS

SEQ ID NO: 1858 - protein, 19 aa, Artificial Sequence
  Description of Artificial Sequence: Synthetic peptide
CGGFHENFYDWFVRQVSKK

SEQ ID NO: 1859 - protein, 19 aa, Artificial Sequence
  Description of Artificial Sequence: Synthetic peptide
  SITE (1): This residue is chemically linked to the N-terminus of SEQ ID NO: 1860
CGGFHENFYDWFVRQVSKK

SEQ ID NO: 1860 - protein, 19 aa, Artificial Sequence
  Description of Artificial Sequence: Synthetic peptide
CGGFHENFYDWFVRQVSKK

SEQ ID NO: 1861 - protein, 13 aa, Artificial Sequence
  Description of Artificial Sequence: Synthetic peptide
  MOD_RES (13): Lig
  SITE (13): This residue is chemically linked to the C-terminus of SEQ ID NO: 1862
SDGFYNAIELLSX

SEQ ID NO: 1862 - protein, 24 aa, Artificial Sequence
  Description of Artificial Sequence: Synthetic peptide
  MOD_RES (24): Lig
KHLCVLEELFWGASLFGYCSGKKX

SEQ ID NO: 1863 - protein, 20 aa, Artificial Sequence
  Description of Artificial Sequence: Synthetic peptide
  MOD_RES (20): Lig
  SITE (20): This residue is chemically linked to the C-terminus of SEQ ID NO: 1864
FHENFYDWFVRQVSKKGGGX

SEQ ID NO: 1864 - protein, 20 aa, Artificial Sequence
  Description of Artificial Sequence: Synthetic peptide
  MOD_RES (20): Lig
FHENFYDWFVRQVSKKGGGX

SEQ ID NO: 1865 - protein, 20 aa, Artificial Sequence
  Description of Artificial Sequence: Synthetic peptide
  MOD_RES (1): Lig
  SITE (1): This residue is chemically linked to the N-terminus of SEQ ID NO: 1866
XGGGFHENFYDWFVRQVSKK

SEQ ID NO: 1866 - protein, 20 aa, Artificial Sequence
  Description of Artificial Sequence: Synthetic peptide
  MOD_RES (1): Lig
XGGGFHENFYDWFVRQVSKK

SEQ ID NO: 1867 - protein, 17 aa, Artificial Sequence
  Description of Artificial Sequence: Synthetic peptide
  MOD_RES (17): Lig
  SITE (17): This residue is chemically linked to the C-terminus of SEQ ID NO: 1868
FHENFYDWFVRQVSKKX

SEQ ID NO: 1868 - protein, 13 aa, Artificial Sequence
  Description of Artificial Sequence: Synthetic peptide
  MOD_RES (13): Lig
SDGFYNAIELLSX

SEQ ID NO: 1869 - protein, 20 aa, Artificial Sequence
  Description of Artificial Sequence: Synthetic peptide
RVDWLQRNANFYDWFVAELG

SEQ ID NO: 1870 - protein, 19 aa, Artificial Sequence
  Description of Artificial Sequence: Synthetic peptide
VDWLQRNANFYDWFVAELG

SEQ ID NO: 1871 - protein, 18 aa, Artificial Sequence
  Description of Artificial Sequence: Synthetic peptide
DWLQRNANFYDWFVAELG

SEQ ID NO: 1872 - protein, 17 aa, Artificial Sequence
  Description of Artificial Sequence: Synthetic peptide
WLQRNANFYDWFVAELG

SEQ ID NO: 1873 - protein, 16 aa, Artificial Sequence
  Description of Artificial Sequence: Synthetic peptide
LQRNANFYDWFVAELG

SEQ ID NO: 1874 - protein, 15 aa, Artificial Sequence
  Description of Artificial Sequence: Synthetic peptide
QRNANFYDWFVAELG

SEQ ID NO: 1875 - protein, 14 aa, Artificial Sequence
  Description of Artificial Sequence: Synthetic peptide
RNANFYDWFVAELG

SEQ ID NO: 1876 - protein, 13 aa, Artificial Sequence
  Description of Artificial Sequence: Synthetic peptide
NANFYDWFVAELG

SEQ ID NO: 1877 - protein, 12 aa, Artificial Sequence
  Description of Artificial Sequence: Synthetic peptide
ANFYDWFVAELG

SEQ ID NO: 1878 - protein, 11 aa, Artificial Sequence
  Description of Artificial Sequence: Synthetic peptide
NFYDWFVAELG

SEQ ID NO: 1879 - protein, 22 aa, Artificial Sequence
  Description of Artificial Sequence: Synthetic peptide
  MOD_RES (22): Lig
GRVDWLQRNANFYDWFVAELGX

SEQ ID NO: 1880 - protein, 22 aa, Artificial Sequence
  Description of Artificial Sequence: Synthetic peptide
  MOD_RES (1): Lig
XGRVDWLQRNANFYDWFVAELG

SEQ ID NO: 1881 - protein, 15 aa, Artificial Sequence
  Description of Artificial Sequence: Synthetic peptide
  MOD_RES (15): Lig
  SITE (15): This residue is chemically linked to the C-terminus of SEQ ID NO: 1882
ACAWPTYWNCGGGGX

SEQ ID NO: 1882 - protein, 17 aa, Artificial Sequence
  Description of Artificial Sequence: Synthetic peptide
  MOD_RES (17): Lig
FHENFYDWFVRQVSKKX

SEQ ID NO: 1883 - protein, 20 aa, Artificial Sequence
  Description of Artificial Sequence: Synthetic peptide
GRVDWLQRNANFYDWFVAEL

SEQ ID NO: 1884 - protein, 19 aa, Artificial Sequence
  Description of Artificial Sequence: Synthetic peptide
GRVDWLQRNANFYDWFVAE

SEQ ID NO: 1885 - protein, 18 aa, Artificial Sequence
  Description of Artificial Sequence: Synthetic peptide
GRVDWLQRNANFYDWFVA

SEQ ID NO: 1886 - protein, 17 aa, Artificial Sequence
  Description of Artificial Sequence: Synthetic peptide
GRVDWLQRNANFYDWFV

SEQ ID NO: 1887 - protein, 13 aa, Artificial Sequence
  Description of Artificial Sequence: Synthetic peptide
  MOD_RES (13): Lig
  SITE (13): This residue is chemically linked to the C-terminus of SEQ ID NO: 1888
SDGFYNAIELLSX

SEQ ID NO: 1888 - protein, 13 aa, Artificial Sequence
  Description of Artificial Sequence: Synthetic peptide
  MOD_RES (13): Lig
SDGFYNAIELLSX

SEQ ID NO: 1889 - protein, 22 aa, Artificial Sequence
  Description of Artificial Sequence: Synthetic peptide
  MOD_RES (22): Lig
  SITE (22): This residue is chemically linked to the C-terminus of SEQ ID NO: 1890
GRVDWLQRNANFYDWFVAELGX

SEQ ID NO: 1890 - protein, 22 aa, Artificial Sequence
  Description of Artificial Sequence: Synthetic peptide
  MOD_RES (22): Lig
GRVDWLQRNANFYDWFVAELGX

SEQ ID NO: 1891 - protein, 16 aa, Artificial Sequence
  Description of Artificial Sequence: Synthetic peptide
  MOD_RES (16): Lig
  SITE (16): This residue is chemically linked to the C-terminus of SEQ ID NO: 1892
SDGFYNAIELLSGGGX

SEQ ID NO: 1892 - protein, 16 aa, Artificial Sequence
  Description of Artificial Sequence: Synthetic peptide
  MOD_RES (16): Lig
SDGFYNAIELLSGGGX

SEQ ID NO: 1893 - protein, 15 aa, Artificial Sequence
  Description of Artificial Sequence: Synthetic peptide
  MOD_RES (1): Acy
  MOD_RES (11): Tic
XCLEEWGASLXQCSG

SEQ ID NO: 1894 - protein, 17 aa, Artificial Sequence
  Description of Artificial Sequence: Synthetic peptide
RWPNFYGYFESLLTHFS

SEQ ID NO: 1895 - protein, 17 aa, Artificial Sequence
  Description of Artificial Sequence: Synthetic peptide
EGWDFYSYFSGLLASVT

SEQ ID NO: 1896 - protein, 17 aa, Artificial Sequence
  Description of Artificial Sequence: Synthetic peptide
LDRQFYRYFQDLLVGFM

SEQ ID NO: 1897 - protein, 17 aa, Artificial Sequence
  Description of Artificial Sequence: Synthetic peptide
WGRSFYRYFETLLAQGI

SEQ ID NO: 1898 - protein, 20 aa, Artificial Sequence
  Description of Artificial Sequence: Synthetic peptide
PLCFLQELFGGASLGGYCSG

SEQ ID NO: 1899 - protein, 20 aa, Artificial Sequence
  Description of Artificial Sequence: Synthetic peptide
WLEQERAWIWCEIQGSGCRA

SEQ ID NO: 1900 - protein, 21 aa, Artificial Sequence
  Description of Artificial Sequence: Synthetic peptide
IQGWEPFYGWFDDVVAQMFEE

SEQ ID NO: 1901 - protein, 21 aa, Artificial Sequence
  Description of Artificial Sequence: Synthetic peptide
TGHRLGLDEQFYWWFRDALSG

SEQ ID NO: 1902 - protein, 15 aa, Artificial Sequence
  Description of Artificial Sequence: Synthetic peptide
  MOD_RES (1): Abu
  MOD_RES (11): Tic
XCLEEWGASLXQCSG

SEQ ID NO: 1903 - protein, 11 aa, Artificial Sequence
  Description of Artificial Sequence: Synthetic peptide
  MOD_RES (3): Hyp
RDXFYDWFDDI

SEQ ID NO: 1904 - protein, 30 aa, Artificial Sequence
  Description of Artificial Sequence: Synthetic peptide
  MOD_RES (17)..(18): Lig
FHENFYDWFVRQVSKKXXSDGFYNAIELLS

SEQ ID NO: 1905 - protein, 16 aa, Artificial Sequence
  Description of Artificial Sequence: Synthetic peptide
GFREGQRWYWFVAQVT

SEQ ID NO: 1906 - protein, 20 aa, Artificial Sequence
  Description of Artificial Sequence: Synthetic peptide
DLRVLCELFGGAYVLGYCSE

SEQ ID NO: 1907 - protein, 20 aa, Artificial Sequence
  Description of Artificial Sequence: Synthetic peptide
HLSVGEELSWWVALLGQWAR

SEQ ID NO: 1908 - protein, 20 aa, Artificial Sequence
  Description of Artificial Sequence: Synthetic peptide
APVSTEELRWGALLFGQWAG

SEQ ID NO: 1909 - protein, 20 aa, Artificial Sequence
  Description of Artificial Sequence: Synthetic peptide
ALEEEWAWVQVRSIRSGLPL

SEQ ID NO: 1910 - protein, 20 aa, Artificial Sequence
  Description of Artificial Sequence: Synthetic peptide
WLEHEWAQIQCELYGRGCTY

SEQ ID NO: 1911 - protein, 17 aa, Artificial Sequence
  Description of Artificial Sequence: Synthetic peptide
QAPSNFYDWFVREWDEE

SEQ ID NO: 1912 - protein, 17 aa, Artificial Sequence
  Description of Artificial Sequence: Synthetic peptide
QSFYDYIEELLGGEWKK

SEQ ID NO: 1913 - protein, 17 aa, Artificial Sequence
  Description of Artificial Sequence: Synthetic peptide
DPFYQGLWEWLRESGEE

SEQ ID NO: 1914 - protein, 20 aa, Artificial Sequence
  Description of Artificial Sequence: Synthetic peptide
  MOD_RES (1): Lig
  SITE (1): This residue is chemically linked to the N-terminus of SEQ ID NO: 1915
XGGGFHENFYDWFVRQVSKK

SEQ ID NO: 1915 - protein, 20 aa, Artificial Sequence
  Description of Artificial Sequence: Synthetic peptide
  MOD_RES (1): Lig
XGGGFHENFYDWFVRQVSKK

SEQ ID NO: 1916 - protein, 20 aa, Artificial Sequence
  Description of Artificial Sequence: Synthetic peptide
  MOD_RES (1): Lig
  SITE (1): This residue is chemically linked to the N-terminus of SEQ ID NO: 1917
XGGGFHENFYDWFVRQVSKK

SEQ ID NO: 1917 - protein, 20 aa, Artificial Sequence
  Description of Artificial Sequence: Synthetic peptide
  MOD_RES (1): Lig
XGGGFHENFYDWFVRQVSKK

SEQ ID NO: 1918 - protein, 20 aa, Artificial Sequence
  Description of Artificial Sequence: Synthetic peptide
  MOD_RES (1): Lig
  SITE (1): This residue is chemically linked to the N-terminus of SEQ ID NO: 1919
XGGGFHENFYDWFVRQVSKK

SEQ ID NO: 1919 - protein, 20 aa, Artificial Sequence
  Description of Artificial Sequence: Synthetic peptide
  MOD_RES (1): Lig
XGGGFHENFYDWFVRQVSKK

SEQ ID NO: 1920 - protein, 20 aa, Artificial Sequence
  Description of Artificial Sequence: Synthetic peptide
  MOD_RES (1): Lig
  SITE (1): This residue is chemically linked to the N-terminus of SEQ ID NO: 1921
XGGGFHENFYDWFVRQVSKK

SEQ ID NO: 1921 - protein, 20 aa, Artificial Sequence
  Description of Artificial Sequence: Synthetic peptide
  MOD_RES (1): Lig
XGGGFHENFYDWFVRQVSKK

SEQ ID NO: 1922 - protein, 18 aa, Artificial Sequence
  Description of Artificial Sequence: Synthetic peptide
  MOD_RES (18): Lig
DWLQRNANFYDWFVAELX

SEQ ID NO: 1923 - protein, 18 aa, Artificial Sequence
  Description of Artificial Sequence: Synthetic peptide
  MOD_RES (1): Lig
XDWLQRNANFYDWFVAEL

SEQ ID NO: 1924 - protein, 17 aa, Artificial Sequence
  Description of Artificial Sequence: Synthetic peptide
  MOD_RES (17): Lig
  SITE (17): This residue is chemically linked to the C-terminus of SEQ ID NO: 1925
DWLQRNANFYDWFVAEX

SEQ ID NO: 1925 - protein, 17 aa, Artificial Sequence
  Description of Artificial Sequence: Synthetic peptide
  MOD_RES (17): Lig
DWLQRNANFYDWFVAEX

SEQ ID NO: 1926 - protein, 18 aa, Artificial Sequence
  Description of Artificial Sequence: Synthetic peptide
  MOD_RES (1): Lig
  SITE (1): This residue is chemically linked to the N-terminus of SEQ ID NO: 1927
XDWLQRNANFYDWFVAEL

SEQ ID NO: 1927 - protein, 18 aa, Artificial Sequence
  Description of Artificial Sequence: Synthetic peptide
  MOD_RES (1): Lig
XDWLQRNANFYDWFVAEL

SEQ ID NO: 1928 - protein, 13 aa, Artificial Sequence
  Description of Artificial Sequence: Synthetic peptide
  MOD_RES (8): Acy
SDGFYNAXELLSG

SEQ ID NO: 1929 - protein, 14 aa, Artificial Sequence
  Description of Artificial Sequence: Synthetic peptide
  MOD_RES (8): Acy
  MOD_RES (13): Aib
SGPFYEEXELLWXG

SEQ ID NO: 1930 - protein, 14 aa, Artificial Sequence
  Description of Artificial Sequence: Synthetic peptide
  MOD_RES (8): Acy
  MOD_RES (10): Aib
  MOD_RES (13): Aib
GGSFYDDXEXLWXG

SEQ ID NO: 1931 - protein, 14 aa, Artificial Sequence
  Description of Artificial Sequence: Synthetic peptide
  MOD_RES (2): Aib
  MOD_RES (8): Acy
  MOD_RES (11): Cha
  MOD_RES (13): Aib
NXPFYDEXDEXWXG

SEQ ID NO: 1932 - protein, 21 aa, Artificial Sequence
  Description of Artificial Sequence: Synthetic peptide
  MOD_RES (20): Acy
GRVDWLQRNANFYDWFVAEXG

SEQ ID NO: 1933 - protein, 20 aa, Artificial Sequence
  Description of Artificial Sequence: Synthetic peptide
  MOD_RES (1): Lig
  SITE (1): This residue is chemically linked to the N-terminus of SEQ ID NO: 1934
XGGGFHENFYDWFVRQVSKK

SEQ ID NO: 1934 - protein, 20 aa, Artificial Sequence
  Description of Artificial Sequence: Synthetic peptide
  MOD_RES (1): Lig
XGGGFHENFYDWFVRQVSKK

SEQ ID NO: 1935 - protein, 13 aa, Artificial Sequence
  Description of Artificial Sequence: Synthetic peptide
  MOD_RES (13): Lig
  SITE (13): This residue is chemically linked to the C-terminus of SEQ ID NO: 1935
SDGFYNAIELLSX

SEQ ID NO: 1936 - protein, 13 aa, Artificial Sequence
  Description of Artificial Sequence: Synthetic peptide
  MOD_RES (13): Lig
SDGFYNAIELLSX

SEQ ID NO: 1937 - protein, 8 aa, Artificial Sequence
  Description of Artificial Sequence: Synthetic peptide
WFYDWFWE

SEQ ID NO: 1938 - protein, 8 aa, Artificial Sequence
  Description of Artificial Sequence: Synthetic peptide
WQGYAWLS

SEQ ID NO: 1939 - protein, 8 aa, Artificial Sequence
  Description of Artificial Sequence: Synthetic peptide
WPGYAWLS

SEQ ID NO: 1940 - protein, 15 aa, Artificial Sequence
  Description of Artificial Sequence: Synthetic peptide
  MOD_RES (2): Aic
  MOD_RES (4): Aib
DXDXEFYDWFDEIPQ

SEQ ID NO: 1941 - protein, 15 aa, Artificial Sequence
  Description of Artificial Sequence: Synthetic peptide
KNNKEFYEWFDEIGQ

SEQ ID NO: 1942 - protein, 15 aa, Artificial Sequence
  Description of Artificial Sequence: Synthetic peptide
  MOD_RES (5): Hyp
YERDXFYDWFDEIGQ

SEQ ID NO: 1943 - protein, 15 aa, Artificial Sequence
  Description of Artificial Sequence: Synthetic peptide
  MOD_RES (5): Hyp
  MOD_RES (14): Hyp
EWRDXFYDWFDEIXE

SEQ ID NO: 1944 - protein, 19 aa, Artificial Sequence
  Description of Artificial Sequence: Synthetic peptide
  MOD_RES (1): Lig
  SITE (1): This residue is chemically linked to the N-terminus of SEQ ID NO: 1945
XGSLDESFYDWFERQLGKK

SEQ ID NO: 1945 - protein, 19 aa, Artificial Sequence
  Description of Artificial Sequence: Synthetic peptide
  MOD_RES (1): Lig
XGSLDESFYDWFERQLGKK

SEQ ID NO: 1946 - protein, 27 aa, Artificial Sequence
  Description of Artificial Sequence: Synthetic peptide
TFYSCLASLLTGTPQPNRGPWERCRKK

SEQ ID NO: 1947 - protein, 17 aa, Artificial Sequence
  Description of Artificial Sequence: Synthetic peptide
  MOD_RES (1): Lig
  SITE (1): This residue is chemically linked to the N-terminus of SEQ ID NO: 1948
XFHENFYDWFVRQVSKK

SEQ ID NO: 1948 - protein, 17 aa, Artificial Sequence
  Description of Artificial Sequence: Synthetic peptide
  MOD_RES (1): Lig
XFHENFYDWFVRQVSKK

SEQ ID NO: 1949 - protein, 23 aa, Artificial Sequence
  Description of Artificial Sequence: Synthetic peptide
KHLCVLEELFWGASLFGYCSGKK

SEQ ID NO: 1950 - protein, 19 aa, Artificial Sequence
  Description of Artificial Sequence: Synthetic peptide
  MOD_RES (19): Lig
  SITE (19): This residue is chemically linked to the C-terminus of SEQ ID NO: 1951
GSLDESFYDWFERQLGKKX

SEQ ID NO: 1951 - protein, 19 aa, Artificial Sequence
  Description of Artificial Sequence: Synthetic peptide
  MOD_RES (19): Lig
GSLDESFYDWFERQLGKKX

SEQ ID NO: 1952 - protein, 19 aa, Artificial Sequence
  Description of Artificial Sequence: Synthetic peptide
  MOD_RES (1): Lig
  SITE (1): This residue is chemically linked to the N-terminus of SEQ ID NO: 1953
XGSLDESFYDWFERQLGKK

SEQ ID NO: 1953 - protein, 19 aa, Artificial Sequence
  Description of Artificial Sequence: Synthetic peptide
  MOD_RES (1): Lig
XGSLDESFYDWFERQLGKK

SEQ ID NO: 1954 - protein, 20 aa, Artificial Sequence
  Description of Artificial Sequence: Synthetic peptide
  MOD_RES (1): Lig
  SITE (1): This residue is chemically linked to the N-terminus of SEQ ID NO: 1955
XGGGFHENFYDWFVRQVSKK

SEQ ID NO: 1955 - protein, 20 aa, Artificial Sequence
  Description of Artificial Sequence: Synthetic peptide
  MOD_RES (1): Lig
XGGGFHENFYDWFVRQVSKK

SEQ ID NO: 1956 - protein, 19 aa, Artificial Sequence
  Description of Artificial Sequence: Synthetic peptide
  MOD_RES (19): Lig
  SITE (19): This residue is chemically linked to the C-terminus of SEQ ID NO: 1957
GSLDESFYDWFERQLGKKX

SEQ ID NO: 1957 - protein, 19 aa, Artificial Sequence
  Description of Artificial Sequence: Synthetic peptide
  MOD_RES (19): Lig
GSLDESFYDWFERQLGKKX

SEQ ID NO: 1958 - protein, 19 aa, Artificial Sequence
  Description of Artificial Sequence: Synthetic peptide
  MOD_RES (1): Lig
  SITE (1): This residue is chemically linked to the N-terminus of SEQ ID NO: 1959
XGSLDESFYDWFERQLGKK

SEQ ID NO: 1959 - protein, 19 aa, Artificial Sequence
  Description of Artificial Sequence: Synthetic peptide
  MOD_RES (1): Lig
XGSLDESFYDWFERQLGKK

SEQ ID NO: 1960 - protein, 19 aa, Artificial Sequence
  Description of Artificial Sequence: Synthetic peptide
  MOD_RES (19): Lig
  SITE (19): This residue is chemically linked to the C-terminus of SEQ ID NO: 1961
GSLDESFYDWFERQLGKKX

SEQ ID NO: 1961 - protein, 19 aa, Artificial Sequence
  Description of Artificial Sequence: Synthetic peptide
  MOD_RES (19): Lig
GSLDESFYDWFERQLGKKX

SEQ ID NO: 1962 - protein, 21 aa, Artificial Sequence
  Description of Artificial Sequence: Synthetic peptide
DLWFNAKEDMNFYDWFVWQLR

SEQ ID NO: 1963 - protein, 22 aa, Artificial Sequence
  Description of Artificial Sequence: Synthetic peptide
EHWNTVDPFYHWISELLRESGA

SEQ ID NO: 1964 - protein, 22 aa, Artificial Sequence
  Description of Artificial Sequence: Synthetic peptide
EHWNTVDPFYQYFAELLRESGA

SEQ ID NO: 1965 - protein, 20 aa, Artificial Sequence
  Description of Artificial Sequence: Synthetic peptide
  MOD_RES (1): Lig
  SITE (1): This residue is chemically linked to the N-terminus of SEQ ID NO: 1966
XGGGFHENFYDWFVRQVSKK

SEQ ID NO: 1966 - protein, 20 aa, Artificial Sequence
  Description of Artificial Sequence: Synthetic peptide
  MOD_RES (1): Lig
XGGGFHENFYDWFVRQVSKK

SEQ ID NO: 1967 - protein, 19 aa, Artificial Sequence
  Description of Artificial Sequence: Synthetic peptide
  MOD_RES (19): Lig
  SITE (19): This residue is chemically linked to the C-terminus of SEQ ID NO: 1968
GSLDESFYDWFERQLGKKX

SEQ ID NO: 1968 - protein, 19 aa, Artificial Sequence
  Description of Artificial Sequence: Synthetic peptide
  MOD_RES (19): Lig
GSLDESFYDWFERQLGKKX

SEQ ID NO: 1969 - protein, 19 aa, Artificial Sequence
  Description of Artificial Sequence: Synthetic peptide
  MOD_RES (1): Lig
  SITE (1): This residue is chemically linked to the N-terminus of SEQ ID NO: 1970
XGSLDESFYDWFERQLGKK

SEQ ID NO: 1970 - protein, 19 aa, Artificial Sequence
  Description of Artificial Sequence: Synthetic peptide
  MOD_RES (1): Lig
XGSLDESFYDWFERQLGKK

SEQ ID NO: 1971 - protein, 20 aa, Artificial Sequence
  Description of Artificial Sequence: Synthetic peptide
  MOD_RES (1): Lig
  SITE (1): This residue is chemically linked to the N-terminus of SEQ ID NO: 1972
XGGGFHENFYDWFVRQVSKK

SEQ ID NO: 1972 - protein, 20 aa, Artificial Sequence
  Description of Artificial Sequence: Synthetic peptide
  MOD_RES (1): Lig
XGGGFHENFYDWFVRQVSKK

SEQ ID NO: 1973 - protein, 19 aa, Artificial Sequence
  Description of Artificial Sequence: Synthetic peptide
  MOD_RES (19): Lig
  SITE (19): This residue is chemically linked to the C-terminus of SEQ ID NO: 1974
GSLDESFYDWFERQLGKKX

SEQ ID NO: 1974 - protein, 19 aa, Artificial Sequence
  Description of Artificial Sequence: Synthetic peptide
  MOD_RES (19): Lig
GSLDESFYDWFERQLGKKX

SEQ ID NO: 1975 - protein, 19 aa, Artificial Sequence
  Description of Artificial Sequence: Synthetic peptide
  MOD_RES (1): Lig
  SITE (1): This residue is chemically linked to the N-terminus of SEQ ID NO: 1976
XGSLDESFYDWFERQLGKK

SEQ ID NO: 1976 - protein, 19 aa, Artificial Sequence
  Description of Artificial Sequence: Synthetic peptide
  MOD_RES (1): Lig
XGSLDESFYDWFERQLGKK

SEQ ID NO: 1977 - protein, 18 aa, Artificial Sequence
  Description of Artificial Sequence: Synthetic peptide
  MOD_RES (1): Lig
  SITE (1): This residue is chemically linked to the N-terminus of SEQ ID NO: 1978
XDWLQRNANFYDWFVAEL

SEQ ID NO: 1978 - protein, 18 aa, Artificial Sequence
  Description of Artificial Sequence: Synthetic peptide
  MOD_RES (1): Lig
XDWLQRNANFYDWFVAEL

SEQ ID NO: 1979 - protein, 18 aa, Artificial Sequence
  Description of Artificial Sequence: Synthetic peptide
  MOD_RES (1): Lig
  SITE (1): This residue is chemically linked to the N-terminus of SEQ ID NO: 1980
XDWLQRNANFYDWFVAEL

SEQ ID NO: 1980 - protein, 18 aa, Artificial Sequence
  Description of Artificial Sequence: Synthetic peptide
  MOD_RES (1): Lig
XDWLQRNANFYDWFVAEL

SEQ ID NO: 1981 - protein, 19 aa, Artificial Sequence
  Description of Artificial Sequence: Synthetic peptide
  MOD_RES (19): Lig
  SITE (19): This residue is chemically linked to the C-terminus of SEQ ID NO: 1982
GSLDESFYDWFERQLGKKX

SEQ ID NO: 1982 - protein, 19 aa, Artificial Sequence
  Description of Artificial Sequence: Synthetic peptide
  MOD_RES (19): Lig
GSLDESFYDWFERQLGKKX

SEQ ID NO: 1983 - protein, 19 aa, Artificial Sequence
  Description of Artificial Sequence: Synthetic peptide
  MOD_RES (1): Lig
  SITE (1): This residue is chemically linked to the N-terminus of SEQ ID NO: 1984
XGSLDESFYDWFERQLGKK

SEQ ID NO: 1984 - protein, 19 aa, Artificial Sequence
  Description of Artificial Sequence: Synthetic peptide
  MOD_RES (1): Lig
XGSLDESFYDWFERQLGKK

SEQ ID NO: 1985 - protein, 20 aa, Artificial Sequence
  Description of Artificial Sequence: Synthetic peptide
  MOD_RES (1): Lig
  SITE (1): This residue is chemically linked to the N-terminus of SEQ ID NO: 1986
XGGGFHENFYDWFVRQVSKK

SEQ ID NO: 1986 - protein, 20 aa, Artificial Sequence
  Description of Artificial Sequence: Synthetic peptide
  MOD_RES (1): Lig
XGGGFHENFYDWFVRQVSKK

SEQ ID NO: 1987 - protein, 21 aa, Artificial Sequence
  Description of Artificial Sequence: Synthetic peptide
RMYFSTGAPQNFYDWFVQEWD

SEQ ID NO: 1988 - protein, 17 aa, Artificial Sequence
  Description of Artificial Sequence: Synthetic peptide
PLRESRNFYDWFVQQLE

SEQ ID NO: 1989 - protein, 19 aa, Artificial Sequence
  Description of Artificial Sequence: Synthetic peptide
RGTRSDPFYHKLSELLQGH

SEQ ID NO: 1990 - protein, 19 aa, Artificial Sequence
  Description of Artificial Sequence: Synthetic peptide
SGSLDESFYDWFERQLGKK

SEQ ID NO: 1991 - protein, 20 aa, Artificial Sequence
  Description of Artificial Sequence: Synthetic peptide
GSLDESFYDWFERQLGKKKS

SEQ ID NO: 1992 - protein, 19 aa, Artificial Sequence
  Description of Artificial Sequence: Synthetic peptide
  MOD_RES (1): Ald
  SITE (1): This residue is chemically linked to the N-terminus of SEQ ID NO: 1993
XGSLDESFYDWFERQLGKK

SEQ ID NO: 1993 - protein, 19 aa, Artificial Sequence
  Description of Artificial Sequence: Synthetic peptide
  MOD_RES (1): Ald
XGSLDESFYDWFERQLGKK

SEQ ID NO: 1994 - protein, 39 aa, Artificial Sequence
  Description of Artificial Sequence: Synthetic peptide
  MOD_RES (20)..(21): Ald
GSLDESFYDWFERQLGKKKXXGSLDESFYDWFERQLGKK

SEQ ID NO: 1995 - protein, 19 aa, Artificial Sequence
  Description of Artificial Sequence: Synthetic peptide
  MOD_RES (1): Ald
  SITE (1): This residue is chemically linked to the N-terminus of SEQ ID NO: 1996
XGSLDESFYDWFERQLGKK

SEQ ID NO: 1996 - protein, 19 aa, Artificial Sequence
  Description of Artificial Sequence: Synthetic peptide
  MOD_RES (1): Ald
XGSLDESFYDWFERQLGKK

SEQ ID NO: 1997 - protein, 20 aa, Artificial Sequence
  Description of Artificial Sequence: Synthetic peptide
  MOD_RES (20): Ald
  SITE (20): This residue is chemically linked to the C-terminus of SEQ ID NO: 1998
GSLDESFYDWFERQLGKKKX

SEQ ID NO: 1998 - protein, 20 aa, Artificial Sequence
  Description of Artificial Sequence: Synthetic peptide
  MOD_RES (20): Ald
GSLDESFYDWFERQLGKKKX

SEQ ID NO: 1999 - protein, 20 aa, Artificial Sequence
  Description of Artificial Sequence: Synthetic peptide
  MOD_RES (20): Ald
  SITE (20): This residue is chemically linked to the C-terminus of SEQ ID NO: 2000
GSLDESFYDWFERQLGKKKX

SEQ ID NO: 2000 - protein, 20 aa, Artificial Sequence
  Description of Artificial Sequence: Synthetic peptide
  MOD_RES (20): Ald
GSLDESFYDWFERQLGKKKX

SEQ ID NO: 2001 - protein, 20 aa, Artificial Sequence
  Description of Artificial Sequence: Synthetic peptide
  MOD_RES (20): Lig
  SITE (20): This residue is chemically linked to the C-terminus of SEQ ID NO: 2002
EEDWLQRNANFYDWFVAELX

SEQ ID NO: 2002 - protein, 20 aa, Artificial Sequence
  Description of Artificial Sequence: Synthetic peptide
  MOD_RES (20): Lig
EEDWLQRNANFYDWFVAELX

SEQ ID NO: 2003 - protein, 20 aa, Artificial Sequence
  Description of Artificial Sequence: Synthetic peptide
  MOD_RES (20): Lig
  SITE (20): This residue is chemically linked to the C-terminus of SEQ ID NO: 2004
EEDWLQRNANFYDWFVAELX

SEQ ID NO: 2004 - protein, 20 aa, Artificial Sequence
  Description of Artificial Sequence: Synthetic peptide
  MOD_RES (20): Lig
EEDWLQRNANFYDWFVAELX

SEQ ID NO: 2005 - protein, 15 aa, Artificial Sequence
  Description of Artificial Sequence: Synthetic peptide
SLDESFYDWFERQLG

SEQ ID NO: 2006 - protein, 14 aa, Artificial Sequence
  Description of Artificial Sequence: Synthetic peptide
LDESFYDWFERQLG

SEQ ID NO: 2007 - protein, 13 aa, Artificial Sequence
  Description of Artificial Sequence: Synthetic peptide
DESFYDWFERQLG

SEQ ID NO: 2008 - protein, 11 aa, Artificial Sequence
  Description of Artificial Sequence: Synthetic peptide
SFYDWFERQLG

SEQ ID NO: 2009 - protein, 10 aa, Artificial Sequence
  Description of Artificial Sequence: Synthetic peptide
FYDWFERQLG

SEQ ID NO: 2010 - protein, 12 aa, Artificial Sequence
  Description of Artificial Sequence: Synthetic peptide
GSLDESFYDWFE

SEQ ID NO: 2011 - protein, 11 aa, Artificial Sequence
  Description of Artificial Sequence: Synthetic peptide
GSLDESFYDWF

SEQ ID NO: 2012 - protein, 9 aa, Artificial Sequence
  Description of Artificial Sequence: Synthetic peptide
ESFYDWFER

SEQ ID NO: 2013 - protein, 8 aa, Artificial Sequence
  Description of Artificial Sequence: Synthetic peptide
ESFYDWFE

SEQ ID NO: 2014 - protein, 7 aa, Artificial Sequence
  Description of Artificial Sequence: Synthetic peptide
ESFYDWF

SEQ ID NO: 2015 - protein, 14 aa, Artificial Sequence
  Description of Artificial Sequence: Synthetic peptide
  MOD_RES (14): Lig
  SITE (14): This residue is chemically linked to the C-terminus of SEQ ID NO: 2016
ESFYDWFERQLGKX

SEQ ID NO: 2016 - protein, 14 aa, Artificial Sequence
  Description of Artificial Sequence: Synthetic peptide
  MOD_RES (14): Lig
ESFYDWFERQLGKX

SEQ ID NO: 2017 - protein, 14 aa, Artificial Sequence
  Description of Artificial Sequence: Synthetic peptide
  MOD_RES (14): Lig
  SITE (14): This residue is chemically linked to the C-terminus of SEQ ID NO: 2018
ESFYDWFERQLGKX

SEQ ID NO: 2018 - protein, 14 aa, Artificial Sequence
  Description of Artificial Sequence: Synthetic peptide
  MOD_RES (14): Lig
ESFYDWFERQLGKX

SEQ ID NO: 2019 - protein, 13 aa, Artificial Sequence
  Description of Artificial Sequence: Synthetic peptide
  MOD_RES (1): Lig
  SITE (1): This residue is chemically linked to the N-terminus of SEQ ID NO: 2020
XESFYDWFERQLG

SEQ ID NO: 2020 - protein, 13 aa, Artificial Sequence
  Description of Artificial Sequence: Synthetic peptide
  MOD_RES (1): Lig
XESFYDWFERQLG

SEQ ID NO: 2021 - protein, 13 aa, Artificial Sequence
  Description of Artificial Sequence: Synthetic peptide
  MOD_RES (1): Lig
  SITE (1): This residue is chemically linked to the N-terminus of SEQ ID NO: 2022
XESFYDWFERQLG

SEQ ID NO: 2022 - protein, 13 aa, Artificial Sequence
  Description of Artificial Sequence: Synthetic peptide
  MOD_RES (1): Lig
XESFYDWFERQLG

SEQ ID NO: 2023 - protein, 14 aa, Artificial Sequence
  Description of Artificial Sequence: Synthetic peptide
  MOD_RES (14): Ald
  SITE (14): This residue is chemically linked to the C-terminus of SEQ ID NO: 2024
ESFYDWFERQLGKX

SEQ ID NO: 2024 - protein, 14 aa, Artificial Sequence
  Description of Artificial Sequence: Synthetic peptide
  MOD_RES (14): Ald
ESFYDWFERQLGKX

SEQ ID NO: 2025 - protein, 24 aa, Artificial Sequence
  Description of Artificial Sequence: Synthetic peptide
  MOD_RES (1): Lig
  SITE (1): This residue is chemically linked to the N-terminus of SEQ ID NO: 2026
XEWLDQEWAWVQCEVYGRGCPSEE

SEQ ID NO: 2026 - protein, 24 aa, Artificial Sequence
  Description of Artificial Sequence: Synthetic peptide
  MOD_RES (1): Lig
XEWLDQEWAWVQCEVYGRGCPSEE

SEQ ID NO: 2027 - protein, 13 aa, Artificial Sequence
  Description of Artificial Sequence: Synthetic peptide
  MOD_RES (1): Ald
  SITE (1): This residue is chemically linked to the N-terminus of SEQ ID NO: 2028
XESFYDWFERQLG

SEQ ID NO: 2028 - protein, 13 aa, Artificial Sequence
  Description of Artificial Sequence: Synthetic peptide
  MOD_RES (1): Ald
XESFYDWFERQLG

SEQ ID NO: 2029 - protein, 13 aa, Artificial Sequence
  Description of Artificial Sequence: Synthetic peptide
  SITE (13): This residue is chemically linked to the C-terminus of SEQ ID NO: 2030
ESFYDWFERQLGK

SEQ ID NO: 2030 - protein, 11 aa, Artificial Sequence
  Description of Artificial Sequence: Synthetic peptide
ACAWPTYWNCG

SEQ ID NO: 2031 - protein, 43 aa, Artificial Sequence
  Description of Artificial Sequence: Synthetic peptide
  MOD_RES (19)..(20): Lig
GSLDESFYDWFERQLGKKXXEWLDQEWAWVQCEVYGRGCPSEE

SEQ ID NO: 2032 - protein, 43 aa, Artificial Sequence
  Description of Artificial Sequence: Synthetic peptide
  MOD_RES (24)..(25): Lig
EWLDQEWAWVQCEVYGRGCPSEEXXGSLDESFYDWFERQLGKK

SEQ ID NO: 2033 - protein, 16 aa, Artificial Sequence
  Description of Artificial Sequence: Synthetic peptide
  SITE (16): This residue is chemically linked to the C-terminus of SEQ ID NO: 2034
ESFYDWFERQLGGGGK

SEQ ID NO: 2034 - protein, 10 aa, Artificial Sequence
  Description of Artificial Sequence: Synthetic peptide
CEVYGRGCPS

SEQ ID NO: 2035 - protein, 16 aa, Artificial Sequence
  Description of Artificial Sequence: Synthetic peptide
  SITE (16): This residue is chemically linked to the C-terminus of SEQ ID NO: 2036
ESFYDWFERQLGGGGK

SEQ ID NO: 2036 - protein, 10 aa, Artificial Sequence
  Description of Artificial Sequence: Synthetic peptide
WLDQEWAWVQ

SEQ ID NO: 2037 - protein, 16 aa, Artificial Sequence
  Description of Artificial Sequence: Synthetic peptide
  SITE (16): This residue is chemically linked to the C-terminus of SEQ ID NO: 2038
ESFYDWFERQLGGGGK

SEQ ID NO: 2038 - protein, 20 aa, Artificial Sequence
  Description of Artificial Sequence: Synthetic peptide
WLDQEWAWVQCEVYGRGCPS

SEQ ID NO: 2039 - protein, 16 aa, Artificial Sequence
  Description of Artificial Sequence: Synthetic peptide
  SITE (16): This residue is chemically linked to the C-terminus of SEQ ID NO: 2040
ESFYDWFERQLGGGGK

SEQ ID NO: 2040 - protein, 19 aa, Artificial Sequence
  Description of Artificial Sequence: Synthetic peptide
LDQEWAWVQCEVYGRGCPS

SEQ ID NO: 2041 - protein, 16 aa, Artificial Sequence
  Description of Artificial Sequence: Synthetic peptide
  SITE (16): This residue is chemically linked to the C-terminus of SEQ ID NO: 2042
ESFYDWFERQLGGGGK

SEQ ID NO: 2042 - protein, 18 aa, Artificial Sequence
  Description of Artificial Sequence: Synthetic peptide
DQEWAWVQCEVYGRGCPS

SEQ ID NO: 2043 - protein, 16 aa, Artificial Sequence
  Description of Artificial Sequence: Synthetic peptide
  SITE (16): This residue is chemically linked to the C-terminus of SEQ ID NO: 2044
ESFYDWFERQLGGGGK

SEQ ID NO: 2044 - protein, 17 aa, Artificial Sequence
  Description of Artificial Sequence: Synthetic peptide
QEWAWVQCEVYGRGCPS

SEQ ID NO: 2045 - protein, 16 aa, Artificial Sequence
  Description of Artificial Sequence: Synthetic peptide
  SITE (16): This residue is chemically linked to the C-terminus of SEQ ID NO: 2046
ESFYDWFERQLGGGGK

SEQ ID NO: 2046 - protein, 16 aa, Artificial Sequence
  Description of Artificial Sequence: Synthetic peptide
EWAWVQCEVYGRGCPS

SEQ ID NO: 2047 - protein, 16 aa, Artificial Sequence
  Description of Artificial Sequence: Synthetic peptide
  SITE (16): This residue is chemically linked to the C-terminus of SEQ ID NO: 2048
ESFYDWFERQLGGGGK

SEQ ID NO: 2048 - protein, 15 aa, Artificial Sequence
  Description of Artificial Sequence: Synthetic peptide
WAWVQCEVYGRGCPS

SEQ ID NO: 2049 - protein, 16 aa, Artificial Sequence
  Description of Artificial Sequence: Synthetic peptide
  SITE (16): This residue is chemically linked to the C-terminus of SEQ ID NO: 2050
ESFYDWFERQLGGGGK

SEQ ID NO: 2050 - protein, 14 aa, Artificial Sequence
  Description of Artificial Sequence: Synthetic peptide
AWVQCEVYGRGCPS

SEQ ID NO: 2051 - protein, 16 aa, Artificial Sequence
  Description of Artificial Sequence: Synthetic peptide
  SITE (16): This residue is chemically linked to the C-terminus of SEQ ID NO: 2052
ESFYDWFERQLGGGGK

SEQ ID NO: 2052 - protein, 13 aa, Artificial Sequence
  Description of Artificial Sequence: Synthetic peptide
WVQCEVYGRGCPS

SEQ ID NO: 2053 - protein, 16 aa, Artificial Sequence
  Description of Artificial Sequence: Synthetic peptide
  SITE (16): This residue is chemically linked to the C-terminus of SEQ ID NO: 2054
ESFYDWFERQLGGGGK

SEQ ID NO: 2054 - protein, 12 aa, Artificial Sequence
  Description of Artificial Sequence: Synthetic peptide
VQCEVYGRGCPS

SEQ ID NO: 2055 - protein, 16 aa, Artificial Sequence
  Description of Artificial Sequence: Synthetic peptide
  SITE (16): This residue is chemically linked to the C-terminus of SEQ ID NO: 2056
ESFYDWFERQLGGGGK

SEQ ID NO: 2056 - protein, 11 aa, Artificial Sequence
  Description of Artificial Sequence: Synthetic peptide
QCEVYGRGCPS

SEQ ID NO: 2057 - protein, 45 aa, Artificial Sequence
  Description of Artificial Sequence: Synthetic peptide
  MOD_RES (20)..(21): Ald
GSLDESFYDWFERQLGKKKXXKEWLDQEWAWVQCEVYGRGCPSEE

SEQ ID NO: 2058 - protein, 20 aa, Artificial Sequence
  Description of Artificial Sequence: Synthetic peptide
  MOD_RES (20): Ald
  SITE (20): This residue is chemically linked to the C-terminus of SEQ ID NO: 2059
GSLDESFYDWFERQLGKKKX

SEQ ID NO: 2059 - protein, 25 aa, Artificial Sequence
  Description of Artificial Sequence: Synthetic peptide
  MOD_RES (25): Ald
EWLDQEWAWVQCEVYGRGCPSEEKX

SEQ ID NO: 2060 - protein, 44 aa, Artificial Sequence
  Description of Artificial Sequence: Synthetic peptide
  MOD_RES (25)..(26): Ald
EWLDQEWAWVQCEVYGRGCPSEEKXXGSLDESFYDWFERQLGKK

SEQ ID NO: 2061 - protein, 19 aa, Artificial Sequence
  Description of Artificial Sequence: Synthetic peptide
  MOD_RES (1): Ald
XGSLDESFYDWFERQLGKK

SEQ ID NO: 2062 - protein, 25 aa, Artificial Sequence
  Description of Artificial Sequence: Synthetic peptide
  MOD_RES (1): Ald
XKEWLDQEWAWVQCEVYGRGCPSEE

SEQ ID NO: 2063 - protein, 42 aa, Artificial Sequence
  Description of Artificial Sequence: Synthetic peptide
WLDQEWAWVQCEVYGRGCPSGGSGGSGSLDESFYDWFERQLG

SEQ ID NO: 2064 - protein, 42 aa, Artificial Sequence; identical to SEQ ID NO: 2063
  Description of Artificial Sequence: Synthetic peptide

SEQ ID NO: 2065 - protein, 42 aa, Artificial Sequence
  Description of Artificial Sequence: Synthetic peptide
GSLDESFYDWFERQLGGGSGGSWLDQEWAWVQCEVYGRGCPS

SEQ ID NO: 2066 - protein, 44 aa, Artificial Sequence; identical to SEQ ID NO: 2060
  Description of Artificial Sequence: Synthetic peptide
  MOD_RES (25)..(26): Ald

SEQ ID NO: 2067 - protein, 44 aa, Artificial Sequence; identical to SEQ ID NO: 2060
  Description of Artificial Sequence: Synthetic peptide
  MOD_RES (25)..(26): Ald

SEQ ID NO: 2068 - protein, 31 aa, Artificial Sequence
  Description of Artificial Sequence: Synthetic peptide
LDQEWAWVQCEVYGRGCPSESFYDWFERQLG

SEQ ID NO: 2069 - protein, 38 aa, Artificial Sequence
  Description of Artificial Sequence: Synthetic peptide
HHHHHHKLDQEWAWVQCEVYGRGCPSESFYDWFERQLG

SEQ ID NO: 2070 - protein, 31 aa, Artificial Sequence; identical to SEQ ID NO: 2068
  Description of Artificial Sequence: Synthetic peptide

SEQ ID NO: 2071 - protein, 30 aa, Artificial Sequence
  Description of Artificial Sequence: Synthetic peptide
LDEWAWVQCVEYGRGCPSESFYDWFERQLG

SEQ ID NO: 2072 - protein, 30 aa, Artificial Sequence
  Description of Artificial Sequence: Synthetic peptide
LDQEWAVQCEVYGRGCPSESFYDWFERQLG

SEQ ID NO: 2073 - protein, 30 aa, Artificial Sequence
  Description of Artificial Sequence: Synthetic peptide
LDQEWAWVCEVYGRGCPSESFYDWFERQLG

SEQ ID NO: 2074 - protein, 30 aa, Artificial Sequence
  Description of Artificial Sequence: Synthetic peptide
LDQEWAWVQCVYGRGCPSESFYDWFERQLG

SEQ ID NO: 2075 - protein, 30 aa, Artificial Sequence
  Description of Artificial Sequence: Synthetic peptide
LDQEWAWVQCEVYGRCPSESFYDWFERQLG

SEQ ID NO: 2076 - protein, 30 aa, Artificial Sequence
  Description of Artificial Sequence: Synthetic peptide
LDQEWAWVQCEVYGRGCSESFYDWFERQLG

SEQ ID NO: 2077 - protein, 30 aa, Artificial Sequence
  Description of Artificial Sequence: Synthetic peptide
LDQEWAWVQCEVYGRGCPESFYDWFERQLG

SEQ ID NO: 2078 - protein, 29 aa, Artificial Sequence
  Description of Artificial Sequence: Synthetic peptide
LDQEWAWVQCEVYGRGCESFYDWFERQLG

SEQ ID NO: 2079 - protein, 30 aa, Artificial Sequence
  Description of Artificial Sequence: Synthetic peptide
LDQEWAWVQCEVYGRGCPSEFYDWFERQLG

SEQ ID NO: 2080 - protein, 30 aa, Artificial Sequence
  Description of Artificial Sequence: Synthetic peptide
LDQEWAWVQCEVYGRGCPSESFYDWFRQLG

SEQ ID NO: 2081 - protein, 23 aa, Artificial Sequence
  Description of Artificial Sequence: Synthetic peptide
EWLDQEWAWVQCEVYGRGCPSEE

SEQ ID NO: 2082 - protein, 31 aa, Artificial Sequence
  Description of Artificial Sequence: Synthetic peptide
ADQEWAWVQCEVYGRGCPSESFYDWFERQLG

SEQ ID NO: 2083 - protein, 30 aa, Artificial Sequence
  Description of Artificial Sequence: Synthetic peptide
LAQEWAWVQCEVYGRGCPSESFYDWFERQL

SEQ ID NO: 2084 - protein, 30 aa, Artificial Sequence
  Description of Artificial Sequence: Synthetic peptide
LDAEWAWVQCEVYGRGCPSESFYDWFERQL

SEQ ID NO: 2085 - protein, 30 aa, Artificial Sequence
  Description of Artificial Sequence: Synthetic peptide
LDQAWAWVQCEVYGRGCPSESFYDWFERQL

SEQ ID NO: 2086 - protein, 30 aa, Artificial Sequence
  Description of Artificial Sequence: Synthetic peptide
LDQEAAWVQCEVYGRGCPSESFYDWFERQL

SEQ ID NO: 2087 - protein, 30 aa, Artificial Sequence
  Description of Artificial Sequence: Synthetic peptide
LDQEWAAVQCEVYGRGCPSESFYDWFERQL

SEQ ID NO: 2088 - protein, 30 aa, Artificial Sequence
  Description of Artificial Sequence: Synthetic peptide
LDQEWAWAQCEVYGRGCPSESFYDWFERQL

SEQ ID NO: 2089 - protein, 30 aa, Artificial Sequence
  Description of Artificial Sequence: Synthetic peptide
LDQEWAWVACEVYGRGCPSESFYDWFERQL

SEQ ID NO: 2090 - protein, 30 aa, Artificial Sequence
  Description of Artificial Sequence: Synthetic peptide
LDQEWAWVQCAVYGRGCPSESFYDWFERQL

SEQ ID NO: 2091 - protein, 30 aa, Artificial Sequence
  Description of Artificial Sequence: Synthetic peptide
LDQEWAWVQCEAYGRGCPSESFYDWFERQL

SEQ ID NO: 2092 - protein, 30 aa, Artificial Sequence
  Description of Artificial Sequence: Synthetic peptide
LDQEWAWVQCEVAGRGCPSESFYDWFERQL

SEQ ID NO: 2093 - protein, 30 aa, Artificial Sequence
  Description of Artificial Sequence: Synthetic peptide
LDQEWAWVQCEVYARGCPSESFYDWFERQL

SEQ ID NO: 2094 - protein, 30 aa, Artificial Sequence
  Description of Artificial Sequence: Synthetic peptide
LDQEWAWVQCEVYGAGCPSESFYDWFERQL

SEQ ID NO: 2095 - protein, 30 aa, Artificial Sequence
  Description of Artificial Sequence: Synthetic peptide
LDQEWAWVQCEVYGRACPSESFYDWFERQL

SEQ ID NO: 2096 - protein, 30 aa, Artificial Sequence
  Description of Artificial Sequence: Synthetic peptide
LDQEWAWVQCEVYGRGCASESFYDWFERQL

SEQ ID NO: 2097 - protein, 30 aa, Artificial Sequence
  Description of Artificial Sequence: Synthetic peptide
LDQEWAWVQSEVYGRGSPSESFYDWFERQL

SEQ ID NO: 2098 - protein, 42 aa, Artificial Sequence
  Description of Artificial Sequence: Synthetic peptide
SLEEEWAQVECEVYGRGCPSGGSGGSGLLDESFYHWFDRQLR

SEQ ID NO: 2099 - protein, 47 aa, Artificial Sequence
  Description of Artificial Sequence: Synthetic peptide
WLDQEWAWVQCEVYGRGCPSGGSGGSGRVDWLQRNANFYDWFVAELG

SEQ ID NO: 2100 - protein, 44 aa, Artificial Sequence
  Description of Artificial Sequence: Synthetic peptide
WLDQEWAWVQCEVYGRGCPSGGSGGSSQAGSAFYAWFDQVLRTV

SEQ ID NO: 2101 - protein, 44 aa, Artificial Sequence
  Description of Artificial Sequence: Synthetic peptide
WLDQEWAWVQCEVYGRGCPSGGSGGSQSDAFYSGLWALIGLSDG

SEQ ID NO: 2102 - protein, 19 aa, Artificial Sequence
  Description of Artificial Sequence: Synthetic peptide
LDQEWAWVQCEVYGRGCPS

SEQ ID NO: 2103 - protein, 28 aa, Artificial Sequence
  Description of Artificial Sequence: Synthetic peptide
  MOD_RES (2): Acy
  MOD_RES (12): Tic
HXCLEEWGASLXQCSGSESFYDWFERQL

SEQ ID NO: 2104 - protein, 31 aa, Artificial Sequence
  Description of Artificial Sequence: Synthetic peptide
SIEEEWAQIKCDVWGRGCPSESFYDWFERQL

SEQ ID NO: 2105 - protein, 36 aa, Artificial Sequence
  Description of Artificial Sequence: Synthetic peptide
RLEEEWAWVQCEVYGRGCPSGSLDESFYDWFERQLG

SEQ ID NO: 2106 - protein, 36 aa, Artificial Sequence
  Description of Artificial Sequence: Synthetic peptide
SLEEEWAQVECEVYGRGCPSGSLDESFYDWFERQLG

SEQ ID NO: 2107 - protein, 36 aa, Artificial Sequence
  Description of Artificial Sequence: Synthetic peptide
SIEEEWAQIKCDVWGRGCPPGLLDESFYHWFDRQLR

SEQ ID NO: 2108 - protein, 35 aa, Artificial Sequence
  Description of Artificial Sequence: Synthetic peptide
HLCVLEELFWGASLFGYCSGGSLDESFYDWFERQL

SEQ ID NO: 2109 - protein, 41 aa, Artificial Sequence
  Description of Artificial Sequence: Synthetic peptide
HLCVLEELFWGASLFGYCSGGRVDWLQRNANFYDWFVAELG

SEQ ID NO: 2110 - protein, 35 aa, Artificial Sequence
  Description of Artificial Sequence: Synthetic peptide
WLDQEWAWVQCEVYGRGCPSDSDWAGYEWFEEQLD

SEQ ID NO: 2111 - protein, 43 aa, Artificial Sequence
  Description of Artificial Sequence: Synthetic peptide
HHHHHHKSLEEEWAQVECEVYGRGCPSGSLDESFYDWFERQLG

SEQ ID NO: 2112 - protein, 70 aa, Artificial Sequence
  Description of Artificial Sequence: Synthetic peptide
MADYKDDDDKGSLDESFYDWFERQLGKKGGSGGSGSLDESFYDWFERQLGKKAAAGAPVPYPDPLEPRPG

SEQ ID NO: 2113 - protein, 76 aa, Artificial Sequence
  Description of Artificial Sequence: Synthetic peptide
MADYKDDDDKGSLDESFYDWFERQLGKKGGSGGSGGSGGSGSLDESFYDWFERQLGKKAAAGAPVPYPDPLEPRPG

SEQ ID NO: 2114 - protein, 72 aa, Artificial Sequence
  Description of Artificial Sequence: Synthetic peptide
MADYKDDDDKGSLDESFYDWFERQLGKKGGSGGSWLDQEWAWVQCEVYGRGCPSAAAGAPVPYPDPLEPRPG

SEQ ID NO: 2115 - protein, 78 aa, Artificial Sequence
  Description of Artificial Sequence: Synthetic peptide
MADYKDDDDKGSLDESFYDWFERQLGKKGGSGGSGGSGGSWLDQEWAWVQCEVYGRGCPSAAAGAPVPYPDPLEPRPG

SEQ ID NO: 2116 - protein, 72 aa, Artificial Sequence
  Description of Artificial Sequence: Synthetic peptide
MADYKDDDDKWLDQEWAWVQCEVYGRGCPSGGSGGSGSLDESFYDWFERQLGKKAAAGAPVPYPDPLEPRPG

SEQ ID NO: 2117 - protein, 16 aa, Artificial Sequence
  Description of Artificial Sequence: Synthetic peptide
FHENFYDWFVQRVSKK

SEQ ID NO: 2118 - protein, 14 aa, Artificial Sequence
  Description of Artificial Sequence: Synthetic peptide
GGTVWPGYEWLRNA

SEQ ID NO: 2119 - protein, 41 aa, Artificial Sequence
  Description of Artificial Sequence: Synthetic peptide
HLCVLEELFWGASLFGYCSGGGSGGSGSLDESFYDWFERQL

SEQ ID NO: 2120 - protein, 47 aa, Artificial Sequence
  Description of Artificial Sequence: Synthetic peptide
HLCVLEELFWGASLFGYCSGGGSGGSGGSGGSGSLDESFYDWFERQL

SEQ ID NO: 2121 - protein, 47 aa, Artificial Sequence; identical to SEQ ID NO: 2099
  Description of Artificial Sequence: Synthetic peptide

SEQ ID NO: 2122 - protein, 53 aa, Artificial Sequence
  Description of Artificial Sequence: Synthetic peptide
WLDQEWAWVQCEVYGRGCPSGGSGGSGGSGGSGRVDWLQRNANFYDWFVAELG

SEQ ID NO: 2123 - protein, 47 aa, Artificial Sequence
  Description of Artificial Sequence: Synthetic peptide
HLCVLEELFWGASLFGYCSGGGSGGSGRVDWLQRNANFYDWFVAELG

SEQ ID NO: 2124 - protein, 53 aa, Artificial Sequence
  Description of Artificial Sequence: Synthetic peptide
HLCVLEELFWGASLFGYCSGGGSGGSGGSGGSGRVDWLQRNANFYDWFVAELG

SEQ ID NO: 2125 - protein, 44 aa, Artificial Sequence
  Description of Artificial Sequence: Synthetic peptide
HLCVLEELFWGASLFGYCSGGGSGGSSQAGSAFYAWFDQVLRTV

SEQ ID NO: 2126 - protein, 51 aa, Artificial Sequence
  Description of Artificial Sequence: Synthetic peptide
HLCVLEELFWGASLFGYCSGGGSGGSTFYSCLASLLTGTPQPNRGPWERCR

SEQ ID NO: 2127 - protein, 44 aa, Artificial Sequence
  Description of Artificial Sequence: Synthetic peptide
HLCVLEELFWGASLFGYCSGGGSGGSQSDAFYSGLWALIGLSDG

SEQ ID NO: 2128 - protein, 41 aa, Artificial Sequence
  Description of Artificial Sequence: Synthetic peptide
HLCVLEELFWGASLFGYCSGGGSGGSDSDWAGYEWFEEQLD

SEQ ID NO: 2129 - protein, 20 aa, Artificial Sequence
  Description of Artificial Sequence: Synthetic peptide
WLDQEWAWVQCEVYGRGCPS

SEQ ID NO: 2130 - protein, 18 aa, Artificial Sequence
  Description of Artificial Sequence: Synthetic peptide
SQAGSAFYAWFDQVLRTV

SEQ ID NO: 2131 - protein, 18 aa, Artificial Sequence
  Description of Artificial Sequence: Synthetic peptide
QSDAFYSGLWALIGLSDG

SEQ ID NO: 2132 - protein, 62 aa, Artificial Sequence
  Description of Artificial Sequence: Synthetic peptide
NNNNLGIEGRISEFIEGRAQPAMAWLDQEWAWVQCEVYGRGCPSAAAGAPVPYPDPLEPRAA

SEQ ID NO: 2133 - protein, 89 aa, Artificial Sequence
  Description of Artificial Sequence: Synthetic peptide
NNNNLGIEGRISEFIEGRAQPAMAWLDQEWAWVQCEVYGRGCPSGGSGGSKWLDQEWAWVQCEVYGRGCPSAAAGAPVPYPDPLEPRAA

SEQ ID NO: 2134 - protein, 74 aa, Artificial Sequence
  Description of Artificial Sequence: Synthetic peptide
NNNNLGIEGRISEFIEGRDYKDDDDKFHENFYDWFVRQVSGSGSLDALDRLMRYFEERPSLGAPVPYPDPLEPR

SEQ ID NO: 2135 - protein, 83 aa, Artificial Sequence
  Description of Artificial Sequence: Synthetic peptide
NNNNLGIEGRISEFIEGRDYKDDDKFHENFYDWFVRQVSGGSGGSHLCVLEELFWGASLFGYCSGAAAGAPVPYPDPLEPRAA

SEQ ID NO: 2136 - protein, 89 aa, Artificial Sequence
  Description of Artificial Sequence: Synthetic peptide
NNNNLGIEGRISEFIEGRDYKDDDKFHENFYDWFVRQVSGGSGGSGGSGGSHLCVLEELFWGASLFGYCSGAAAGAPVPYPDPLEPRAA

SEQ ID NO: 2137 - protein, 86 aa, Artificial Sequence
  Description of Artificial Sequence: Synthetic peptide
NNNNLGIEGRISEFIEGRDYKDDDKFHENFYDWFVRQVSGGSGGSGGSHLCVLEELFWGASLFGYCSGAAAGAPVPYPDPLEPRAA

SEQ ID NO: 2138 - protein, 94 aa, Artificial Sequence
  Description of Artificial Sequence: Synthetic peptide
NNNNLGIEGRISEFIEVRAQPAMARGGGTFYEWFESALRKHGAGGGSGGSGGSGGSRGGGTFYEWFESALRKHGAGAAAGAPVPYPDPLEPRAA

SEQ ID NO: 2139 - protein, 79 aa, Artificial Sequence
  Description of Artificial Sequence: Synthetic peptide
NNNNLGIEGRISEFIEGRAQPAMAFHENFYDWFVRQVSGGSGGSGGSFHENFYDWFVRQVSAAAGAPVPYPDPLEPRAA

SEQ ID NO: 2140 - protein, 56 aa, Artificial Sequence
  Description of Artificial Sequence: Synthetic peptide
NNNNLGIEGRISEFIEGRAQPAMAFHENFYDWFVRQVSAAAGAPVPYPDPLEPRAA

SEQ ID NO: 2141 - protein, 88 aa, Artificial Sequence
  Description of Artificial Sequence: Synthetic peptide
NNNNLGIEGRISEFIEGRAQPAMARGGGTFYEWFESTLRKHGAGGGSGGSRGGGTFYEWFESALRKHGAGAAAGAPVPYPDPLEPRAA

SEQ ID NO: 2142 - protein, 90 aa, Artificial Sequence
  Description of Artificial Sequence: Synthetic peptide
NNNNLGIEGRISEFIEGRAQPAMAFHENFYDWFVRQVSGGSFHENFYDWFVRQVSGGSFHENFYDWFVRQVSAAAGAPVPYPDPLEPRAA

SEQ ID NO: 2143 - protein, 73 aa, Artificial Sequence
  Description of Artificial Sequence: Synthetic peptide
NNNNLGIEGRISEFIEGRAQPAMAFHENFYDWFVRQVSGGSGGSFHENFYDWFVRQVSGAPVPYPDPLEPRAA

SEQ ID NO: 2144 - protein, 88 aa, Artificial Sequence
  Description of Artificial Sequence: Synthetic peptide
NNNNLGIEGRISEFIEGRAQPAMAFHENFYDWFVRQVSGGSGGSGGSGGSAQPAMAFHENFYDWFVRQVSAAAGAPVPYPDPLEPRAA

SEQ ID NO: 2145 - protein, 62 aa, Artificial Sequence
  Description of Artificial Sequence: Synthetic peptide
NNNNLGIEGRISEFIEGRAQPAMARGGGTFYEWFESALRKHGAGAAAGAPVPYPDPLEPRAA

SEQ ID NO: 2146 - protein, 73 aa, Artificial Sequence
  Description of Artificial Sequence: Synthetic peptide
NNNNLGIEGRISEFIEGRAQPAMAFHENFYDWFVRQVSGGSFHENFYDWFVRQVSAAAGAPVPYPDPLEPRAA

SEQ ID NO: 2147 - protein, 57 aa, Artificial Sequence
  Description of Artificial Sequence: Synthetic peptide
NNNNLGIEGRISEFIEGRDYKDDDDKFHENFYDWFVRQVSAAGAPVPYPDPLEPRAA

SEQ ID NO: 2148 - protein, 64 aa, Artificial Sequence
  Description of Artificial Sequence: Synthetic peptide
NNNNLGIEGRISEFIEGRDYKDDDDKHLCVLEELFWGASLFGYCSGAAAGAPVPYPDPLEPRAA

SEQ ID NO: 2149 - protein, 56 aa, Artificial Sequence
  Description of Artificial Sequence: Synthetic peptide
NNNNLGIEGRISEFGSADYKDLDALDRLMRYFEERPSLAAAGAPVPYPDPLEPRAA

SEQ ID NO: 2150 - protein, 83 aa, Artificial Sequence; identical to SEQ ID NO: 2135
  Description of Artificial Sequence: Synthetic peptide

SEQ ID NO: 2151 - protein, 65 aa, Artificial Sequence
  Description of Artificial Sequence: Synthetic peptide
DYKDDDKFHENFYDWFVRQVSGGSGGSHLCVLEELFWGASLFGYCSGAAAGAPVPYPDPLEPRAA

SEQ ID NO: 2152 - protein, 89 aa, Artificial Sequence; identical to SEQ ID NO: 2136
  Description of Artificial Sequence: Synthetic peptide

SEQ ID NO: 2153 - protein, 71 aa, Artificial Sequence
  Description of Artificial Sequence: Synthetic peptide
DYKDDDKFHENFYDWFVRQVSGGSGGSGGSGGSHLCVLEELFWGASLFGYCSGAAAGAPVPYPDPLEPRAA

SEQ ID NO: 2154 - protein, 86 aa, Artificial Sequence; identical to SEQ ID NO: 2137
  Description of Artificial Sequence: Synthetic peptide

SEQ ID NO: 2155 - protein, 68 aa, Artificial Sequence
  Description of Artificial Sequence: Synthetic peptide
DYKDDDKFHENFYDWFVRQVSGGSGGSGGSHLCVLEELFWGASLFGYCSGAAAGAPVPYPDPLEPRAA

SEQ ID NO: 2156 - protein, 18 aa, Artificial Sequence
  Description of Artificial Sequence: Synthetic peptide
LCQRLGVGWPGWLSGWCA

SEQ ID NO: 2157 - protein, 17 aa, Artificial Sequence
  Description of Artificial Sequence: Synthetic peptide
LCQSWGVRIGWLTGLCP

SEQ ID NO: 2158 - protein, 62 aa, Artificial Sequence; identical to SEQ ID NO: 2132
  Description of Artificial Sequence: Synthetic peptide

SEQ ID NO: 2159 - protein, 89 aa, Artificial Sequence; identical to SEQ ID NO: 2133
  Description of Artificial Sequence: Synthetic peptide

SEQ ID NO: 2160 - protein, 64 aa, Artificial Sequence; identical to SEQ ID NO: 2148
  Description of Artificial Sequence: Synthetic peptide

SEQ ID NO: 2161 - protein, 90 aa, Artificial Sequence
  Description of Artificial Sequence: Synthetic peptide
NNNNLGIEGRISEFIEGRDYKDDDDKHLCVLEELFWGASLFGYCSGGGSGGSHLCVLEELFWGASLFGYCSGAAAGAPVPYPDPLEPRAA

SEQ ID NO: 2162 - protein, 96 aa, Artificial Sequence
  Description of Artificial Sequence: Synthetic peptide
NNNNLGIEGRISEFIEGRDYKDDDDKHLCVLEELFWGASLFGYCSGGGSGGSGGSGGSHLCVLEELFWGASLFGYCSGAAAGAPVPYPDPLEPRAA

SEQ ID NO: 2163 - protein, 116 aa, Artificial Sequence
  Description of Artificial Sequence: Synthetic peptide
NNNNLGIEGRISEFIEGRDYKDDDDKHLCVLEELFWGASLFGYCSGGGSGGSHLCVLEELFWGASLFGYCSGGGSGGSHLCVLEELFWGASLFGYCSGAAAGAPVPYPDPLEPRAA

SEQ ID NO: 2164 - protein, 56 aa, Artificial Sequence; identical to SEQ ID NO: 2140
  Description of Artificial Sequence: Synthetic peptide

SEQ ID NO: 2165 - protein, 73 aa, Artificial Sequence; identical to SEQ ID NO: 2146
  Description of Artificial Sequence: Synthetic peptide

SEQ ID NO: 2166 - protein, 71 aa, Artificial Sequence
  Description of Artificial Sequence: Synthetic peptide
NNNNLGIEGRISEFIEGRAQPAMAFHENFYDWFVRQVSGGSGGSFHENFYDWFVRQVSGAPVPYPDPLEPR

SEQ ID NO: 2167 - protein, 79 aa, Artificial Sequence; identical to SEQ ID NO: 2139
  Description of Artificial Sequence: Synthetic peptide

SEQ ID NO: 2168 - protein, 88 aa, Artificial Sequence; identical to SEQ ID NO: 2144
  Description of Artificial Sequence: Synthetic peptide

SEQ ID NO: 2169 - protein, 90 aa, Artificial Sequence; identical to SEQ ID NO: 2142
  Description of Artificial Sequence: Synthetic peptide

SEQ ID NO: 2170 - protein, 65 aa, Artificial Sequence
  Description of Artificial Sequence: Synthetic peptide
NNNNLGIEGRISEFIEGRDYKDDDDKVRVDWLQRNANFYDWFVAELVAAAGAPVPYPDPLEPRAA

SEQ ID NO: 2171 - protein, 92 aa, Artificial Sequence
  Description of Artificial Sequence: Synthetic peptide
NNNNLGIEGRISEFIEGRDYKDDDDKVRVDWLQRNANFYDWFVAELGGGSGGSGRVDWLQRNANFYDWFVAELGAAAGAPVPYPDPLEPRAA

SEQ ID NO: 2172 - protein, 98 aa, Artificial Sequence
  Description of Artificial Sequence: Synthetic peptide
NNNNLGIEGRISEFIEGRDYKDDDDKVRVDWLQRNANFYAWFVAELGGGSGGSGGSGGSGRVDWLQRNANFYDWFVAELGAAAGAPVPYPDPLEPRAA

SEQ ID NO: 2173 - protein, 62 aa, Artificial Sequence; identical to SEQ ID NO: 2145
  Description of Artificial Sequence: Synthetic peptide

SEQ ID NO: 2174 - protein, 88 aa, Artificial Sequence; identical to SEQ ID NO: 2141
  Description of Artificial Sequence: Synthetic peptide

SEQ ID NO: 2175 - protein, 94 aa, Artificial Sequence; identical to SEQ ID NO: 2138
  Description of Artificial Sequence: Synthetic peptide

SEQ ID NO: 2176 - protein, 61 aa, Artificial Sequence
  Description of Artificial Sequence: Synthetic peptide
NNNNLGIEGRISEFIEGRDYKDDDDKGSLDESFYDWFERQLGKKAAGAPVPYPDPLEPRAA

SEQ ID NO: 2177 - protein, 86 aa, Artificial Sequence
  Description of Artificial Sequence: Synthetic peptide
NNNNLGIEGRISEFIEGRDYKDDDDKGSLDESFYDWFERQLGKKGGSGGSGSLDESFYDWFERQLGKKAAAGAPVPYPDPLEPRAA

SEQ ID NO: 2178 - protein, 92 aa, Artificial Sequence
  Description of Artificial Sequence: Synthetic peptide
NNNNLGIEGRISEFIEGRDYKDDDDKGSLDESFYDWFERQLGKKGGSGGSGGSGGSGSLDESFYDWFERQLGKKAAAGAPVPYPDPLEPRAA

SEQ ID NO: 2179 - protein, 57 aa, Artificial Sequence; identical to SEQ ID NO: 2147
  Description of Artificial Sequence: Synthetic peptide

SEQ ID NO: 2180 - protein, 64 aa, Artificial Sequence; identical to SEQ ID NO: 2148
  Description of Artificial Sequence: Synthetic peptide

SEQ ID NO: 2181 - protein, 56 aa, Artificial Sequence; identical to SEQ ID NO: 2149
  Description of Artificial Sequence: Synthetic peptide

SEQ ID NO: 2182 - protein, 76 aa, Artificial Sequence
  Description of Artificial Sequence: Synthetic peptide
NNNNLGIEGRISEFIEGRDYKDDDDKFHENFYDWFVRQVSGGSGGSLDALDRLMRYFEERPSLGAPVPYPDPLEPR

SEQ ID NO: 2183 - protein, 60 aa, Artificial Sequence
  Description of Artificial Sequence: Synthetic peptide
DYKDDDKFHENFYDWFVRQVSGSGSLDALDRLMRYFEERPSLAAAGAPVPYPDPLEPRAA

SEQ ID NO: 2184 - protein, 83 aa, Artificial Sequence; identical to SEQ ID NO: 2135
  Description of Artificial Sequence: Synthetic peptide

SEQ ID NO: 2185 - protein, 65 aa, Artificial Sequence; identical to SEQ ID NO: 2151
  Description of Artificial Sequence: Synthetic peptide

SEQ ID NO: 2186 - protein, 89 aa, Artificial Sequence; identical to SEQ ID NO: 2136
  Description of Artificial Sequence: Synthetic peptide

SEQ ID NO: 2187 - protein, 71 aa, Artificial Sequence; identical to SEQ ID NO: 2153
  Description of Artificial Sequence: Synthetic peptide

SEQ ID NO: 2188 - protein, 86 aa, Artificial Sequence; identical to SEQ ID NO: 2137
  Description of Artificial Sequence: Synthetic peptide

SEQ ID NO: 2189 - protein, 74 aa, Artificial Sequence
  Description of Artificial Sequence: Synthetic peptide
DYKDDDDKVRVDWLQRNANFYDWFVAELGGGSGGSGRVDWLQRNANFYDWFVAELGAAAGAPVPYPDPLEPRSA

SEQ ID NO: 2190 - protein, 80 aa, Artificial Sequence
  Description of Artificial Sequence: Synthetic peptide
DYKDDDDKVRVDWLQRNANFYAWFVAELGGGSGGSGGSGGSGRVDWLQRNANFYDWFVAELGAAAGAPVPYPDPLEPRAA

SEQ ID NO: 2191 - protein, 46 aa, Artificial Sequence
  Description of Artificial Sequence: Synthetic peptide
DYKDDDDKHLCVLEELFWGASLFGYCSGAAAGAPVPYPDPLEPRAA

SEQ ID NO: 2192 - protein, 72 aa, Artificial Sequence
  Description of Artificial Sequence: Synthetic peptide
DYKDDDDKHLCVLEELFWGASLFGYCSGGGSGGSHLCVLEELFWGASLFGYCSGAAAGAPVPYPDPLEPRAA

SEQ ID NO: 2193 - protein, 70 aa, Artificial Sequence; identical to SEQ ID NO: 2112
  Description of Artificial Sequence: Synthetic peptide

SEQ ID NO: 2194 - protein, 76 aa, Artificial Sequence; identical to SEQ ID NO: 2113
  Description of Artificial Sequence: Synthetic peptide

SEQ ID NO: 2195 - protein, 48 aa, Artificial Sequence
  Description of Artificial Sequence: Synthetic peptide
MADYKDDDDKWLDQEWAWVQCEVYGRGCPSAAAGAPVPYPDPLEPRPG

SEQ ID NO: 2196 - protein, 72 aa, Artificial Sequence; identical to SEQ ID NO: 2116
  Description of Artificial Sequence: Synthetic peptide

SEQ ID NO: 2197 - protein, 72 aa, Artificial Sequence; identical to SEQ ID NO: 2114
  Description of Artificial Sequence: Synthetic peptide

SEQ ID NO: 2198 - protein, 78 aa, Artificial Sequence; identical to SEQ ID NO: 2115
  Description of Artificial Sequence: Synthetic peptide

SEQ ID NO: 2199 - protein, 74 aa, Artificial Sequence
  Description of Artificial Sequence: Synthetic peptide
MADYKDEIEAEWGRVRCLVYGRCVGGGGSGGSGGSGGSGSLDESFYDWFERQLGKKAAAGAPVPYPDPLEPRPG

SEQ ID NO: 2200 - protein, 81 aa, Artificial Sequence
  Description of Artificial Sequence: Synthetic peptide
MADYKDDDDKWLDQEWAWVQCEVYGRGCPSQPPPPDITTHRADPQGSLDESFYDWFERQLGKKAAAGAPVPYPDPLEPRPG

SEQ ID NO: 2201 - protein, 79 aa, Artificial Sequence
  Description of Artificial Sequence: Synthetic peptide
MADYKDDDDKWLDQEWAWVQCEVYGRGCPSTPKPPTPPPLSADGSLDESFYDWFERQLGKKAAAGAPVPYPDPLEPRPG

SEQ ID NO: 2202 - protein, 29 aa, Artificial Sequence
  Description of Artificial Sequence: Synthetic peptide
MQNDDGSLDESFYDWFERQLGHHHHHHPG

SEQ ID NO: 2203 - protein, 31 aa, Artificial Sequence
  Description of Artificial Sequence: Synthetic peptide
MGSLDESFYDWFERQLGEEEGGDHHHHHHPG

SEQ ID NO: 2204 - protein, 35 aa, Artificial Sequence
  Description of Artificial Sequence: Synthetic peptide
MQNDDGSLDESFYDWFERQLGEEEGGDHHHHHHPG

SEQ ID NO: 2205 - protein, 13 aa, Artificial Sequence
  Description of Artificial Sequence: Synthetic peptide
GAPVPYPDPLEPR

SEQ ID NO: 2206 - protein, 20 aa, Artificial Sequence
  Description of Artificial Sequence: Synthetic peptide
WLDQERAWLWCEISGRGCLS

SEQ ID NO: 2207 - protein, 43 aa, Artificial Sequence
  Description of Artificial Sequence: Synthetic peptide
LDQERAWLWCEISGRGCLSGGSGGSGSLDESFYDWFERQLGKK

SEQ ID NO: 2208 - protein, 50 aa, Artificial Sequence
  Description of Artificial Sequence: Synthetic peptide
WLDQERAWLWCEISGRGCLSGGSGGSGGSGGSGSLDESFYDWFERQLGKK

SEQ ID NO: 2209 - protein, 24 aa, Artificial Sequence
  Description of Artificial Sequence: Synthetic peptide
DYKDFYDAIDQLVRGSARAGGTRD

SEQ ID NO: 2210 - protein, 52 aa, Artificial Sequence
  Description of Artificial Sequence: Synthetic peptide
WLDQERAWLWCEISGRGCLSGGSGGSGIISQSCPESFYDWFAGQVSDPWWCW

SEQ ID NO: 2211 - protein, 44 aa, Artificial Sequence
  Description of Artificial Sequence: Synthetic peptide
WLDQERAWLWCEISGRGCLSGGSGGSGSLDESFYDWFERQLGKK

SEQ ID NO: 2212 - protein, 50 aa, Artificial Sequence; identical to SEQ ID NO: 2208
  Description of Artificial Sequence: Synthetic peptide

SEQ ID NO: 2213 - protein, 36 aa, Artificial Sequence
  Description of Artificial Sequence: Synthetic peptide
GLDQEQAWVECEVYGRGCPYGSLDESFYDWFERQLG

SEQ ID NO: 2214 - protein, 42 aa, Artificial Sequence
  Description of Artificial Sequence: Synthetic peptide
RLEEEWAWVQCEVYGRGCPSGGSGGSGSLDESFYDWFERQLG

SEQ ID NO: 2215 - protein, 42 aa, Artificial Sequence
  Description of Artificial Sequence: Synthetic peptide
SLDREWACVKCEVYGRGCPCGGSGGSGSLDESFYDWFERQLG

SEQ ID NO: 2216 - protein, 42 aa, Artificial Sequence
  Description of Artificial Sequence: Synthetic peptide
SLEEEWAQVECEVYGRGCPSGGSGGSGSLDESFYDWFERQLG

SEQ ID NO: 2217 - protein, 42 aa, Artificial Sequence; identical to SEQ ID NO: 2098
  Description of Artificial Sequence: Synthetic peptide

SEQ ID NO: 2218 - protein, 42 aa, Artificial Sequence
  Description of Artificial Sequence: Synthetic peptide
SIEEEWAQIKCDVWGRGCPPGGSGGSGLLDESFYHWFDRQLR

SEQ ID NO: 2219 - protein, 37 aa, Artificial Sequence
  Description of Artificial Sequence: Synthetic peptide
QLDLEWAWVQCEVYGRGCGGSGSLDESFYDWFERQLG

SEQ ID NO: 2220 - protein, 33 aa, Artificial Sequence
  Description of Artificial Sequence: Synthetic peptide
QLDEEWAGVQCEVYGRGCSLDESFYDWFERQLG

SEQ ID NO: 2221 - protein, 42 aa, Artificial Sequence
  Description of Artificial Sequence: Synthetic peptide
RLEEEWRWVQCEVYGRGCAAGGSGGSGSLDESFYDWFERQLG

SEQ ID NO: 2222 - protein, 41 aa, Artificial Sequence
  Description of Artificial Sequence: Synthetic peptide
SLDQEWAWVQCEVYGRGCPSGGSGGSDSDWAGYEWFEEQLD

SEQ ID NO: 2223 - protein, 16 aa, Artificial Sequence
  Description of Artificial Sequence: Synthetic peptide
  MOD_RES (6): Asp or Leu
GLADEXFYEWFERQLR

SEQ ID NO: 2224 - protein, 16 aa, Artificial Sequence
  Description of Artificial Sequence: Synthetic peptide
  MOD_RES (9): Glu or Ala
GQLDEDFYXWFDRQLS

SEQ ID NO: 2225 - protein, 16 aa, Artificial Sequence
  Description of Artificial Sequence: Synthetic peptide
  MOD_RES (3): Met or Trp
  MOD_RES (9): Glu or Ala
GFXDESFYXWFERQLR

SEQ ID NO: 2226 - protein, 20 aa, Artificial Sequence
  Description of Artificial Sequence: Synthetic peptide
  MOD_RES (14): Tyr or Trp
SLEEEWAQIECEVXGRGCPS

SEQ ID NO: 2227 - protein, 20 aa, Artificial Sequence
  Description of Artificial Sequence: Synthetic peptide
WLDQEWVQCEVYGRGCPSKK

SEQ ID NO: 2228 - protein, 26 aa, Artificial Sequence
  Description of Artificial Sequence: Synthetic peptide
VGRASGFPENFYDWFGRQLSLQSGEQ

SEQ ID NO: 2229 - protein, 18 aa, Artificial Sequence
  Description of Artificial Sequence: Synthetic peptide
GSLDESFYDWFERQLGKK

SEQ ID NO: 2230 - protein, 24 aa, Artificial Sequence
  Description of Artificial Sequence: Synthetic peptide
DYKDCWARPCGDAANFYDWFVQQA

SEQ ID NO: 2231 - protein, 74 aa, Artificial Sequence
  Description of Artificial Sequence: Synthetic peptide
ADYKDWLDQERAWLWCEISGRGCLSAAAGAPADYKDDDDKGSLDESFYDWFERQLKKAAAGAPVPYPDPLEPRG

SEQ ID NO: 2232 - protein, 25 aa, Artificial Sequence
  Description of Artificial Sequence: Synthetic peptide
SFYSCLESLVNGPAEKSRGQWDGCR

SEQ ID NO: 2233 - protein, 27 aa, Artificial Sequence
  Description of Artificial Sequence: Synthetic peptide
TFYSCLASLLTGTPQPNRGPWERCRKK

SEQ ID NO: 2234 - protein, 25 aa, Artificial Sequence
  Description of Artificial Sequence: Synthetic peptide
SFYSCLESLVNGGAERSDGQWEGCR

SEQ ID NO: 2235 - protein, 25 aa, Artificial Sequence
  Description of Artificial Sequence: Synthetic peptide
SFYSCLGSLLTGAPQPIRGAWDRCR

SEQ ID NO: 2236 - protein, 27 aa, Artificial Sequence
  Description of Artificial Sequence: Synthetic peptide
TFYSCLASLLTGTPQPNRGPWERCRKK

SEQ ID NO: 2237 - protein, 36 aa, Artificial Sequence; identical to SEQ ID NO: 1793
  Description of Artificial Sequence: Synthetic peptide

SEQ ID NO: 2238 - protein, 40 aa, Artificial Sequence
  Description of Artificial Sequence: Synthetic peptide
  MOD_RES (19): diaminopropionic acid with a 2-aminohydroxyacetyl group on the side chain amino group
  MOD_RES (20): synthetic linker
  MOD_RES (21): diaminopropionic acid with a 2-aminohydroxyacetyl group on the side chain amino group
  MOD_RES (40): 2-(pyridine-4-yl)malonaldehyde
GSLDESFYDWFERQLGKKXXXGSLDESFYDWFERQLGKKX

SEQ ID NO: 2239 - protein, 74 aa, Artificial Sequence
  Description of Artificial Sequence: Synthetic peptide
ADYKDDDDKGSLDESFYDWFERQLAAAGAPADYKDDDDKGSLDESFYDWFERQLKKAAAGAPVPYPDPLEPRPG

SEQ ID NO: 2240 - protein, 65 aa, Artificial Sequence
  Description of Artificial Sequence: Synthetic peptide
ADYKDGIISQSCPESFYDWFFAGQVSDPWWCWGSLDESFYDWFERQLAAAGAPVPYPDPLEPRPG

SEQ ID NO: 2241 - protein, 84 aa, Artificial Sequence
  Description of Artificial Sequence: Synthetic peptide
ADYKDSFYSCLESLVNGGAERSDGQWEGCRGGSGGSGGSGGSSFYSCLESLVNGGAERSDGQWEGCRAAAGAPVPYPDPLEPRP

SEQ ID NO: 2242 - protein, 78 aa, Artificial Sequence
  Description of Artificial Sequence: Synthetic peptide
ADYKDDDDKGSLDESFYDWFERQLAAAGAPADYKDTFYSCLASLLTGTPQPNRGPWERCRAAAGAPVPYPDPLEPRPG

SEQ ID NO: 2243 - protein, 69 aa, Artificial Sequence
  Description of Artificial Sequence: Synthetic peptide
ADYKDGIISQSCPESFYDWFFAGQVSDPWWCWWLEQERAWIWCEKGSGCRAAAAGAPVPYPDPLEPRPG

SEQ ID NO: 2244 - protein, 75 aa, Artificial Sequence
  Description of Artificial Sequence: Synthetic peptide
ADYKDWLEQERAWIWCEKGSGCRAGGSGGSGGSGGSDDDKGSLDESFYDWFERQLGKKAAAGAPVPYPDPLEPRG

SEQ ID NO: 2245 - protein, 27 aa, Artificial Sequence
  Description of Artificial Sequence: Synthetic peptide
EISFRCQLFVLAGMHPCPVDVGGEGFE

SEQ ID NO: 2246 - protein, 27 aa, Artificial Sequence
  Description of Artificial Sequence: Synthetic peptide
EGSSICNLLARAQIVELALCEMGVQEE

SEQ ID NO: 2247 - protein, 27 aa, Artificial Sequence
  Description of Artificial Sequence: Synthetic peptide
EGYSWLRDVLMEKQAQLKREGSVGRQE

SEQ ID NO: 2248 - protein, 21 aa, Artificial Sequence
  Description of Artificial Sequence: Synthetic peptide
GRVDWLQRNANFYDWFVAELG

SEQ ID NO: 2249 - protein, 26 aa, Artificial Sequence
  Description of Artificial Sequence: Synthetic peptide
GIISQSCPESFYDWFAGQVSDPWWCW

SEQ ID NO: 2250 - protein, 56 aa, Artificial Sequence
  Description of Artificial Sequence: Synthetic peptide
ISGRGCLSGGSGGSGGSGGSGSLDESFYDWFERQLGKKAAAGAPVPYPDPLEPRPG

SEQ ID NO: 2251 - protein, 75 aa, Artificial Sequence; identical to SEQ ID NO: 2244
  Description of Artificial Sequence: Synthetic peptide

SEQ ID NO: 2252 - protein, 20 aa, Artificial Sequence
  Description of Artificial Sequence: Synthetic peptide
WLDQERAWLWCEISGRGCLS

SEQ ID NO: 2253 - protein, 20 aa, Artificial Sequence
  Description of Artificial Sequence: Synthetic peptide
GVDEVRAWLWCQISGLGCES

SEQ ID NO: 2254 - protein, 78 aa, Artificial Sequence
  Description of Artificial Sequence: Synthetic peptide
ADYKDDDDKGSLDESFYDWFERQLGKKGGSGGSGGSGGSDDDKGSLDESFYDWFERQLGKKAAAGAPVPYPDPLEPRG

SEQ ID NO: 2255 - protein, 81 aa, Artificial Sequence
  Description of Artificial Sequence: Synthetic peptide
ADYKDCWARPCGDAANFYDWFVQQASKKGGSGGSGGSGGSCWARPCGDAANFYDWFVQQASKKAAAGAPVPYPDPLEPRPG

SEQ ID NO: 2256 - protein, 83 aa, Artificial Sequence
  Description of Artificial Sequence: Synthetic peptide
ADYKDGIISQSCPESFYDWFAGQVSDPWWCWGGSGGSGIISQSCPESFYDWFAGQVSDPWWCWKKAAAGAPVPYPDPLEPRPG

SEQ ID NO: 2257 - protein, 83 aa, Artificial Sequence
  Description of Artificial Sequence: Synthetic peptide
ADYKDCWARPCGDAANFYDWFVQQASKKGGSGGSGGSGGSSFYSCLESLVNGGAERSDGQWEGCRAAAGAPVPYPDPLEPRPG

SEQ ID NO: 2258 - protein, 83 aa, Artificial Sequence
  Description of Artificial Sequence: Synthetic peptide
ADYKDSFYSCLESLVNGGAERSDGQWEGCRGGSGGSGGSGGSCWARPCGDAANFYDWFVQQASKKAAAGAPVPYPDPLEPRPG

SEQ ID NO: 2259 - protein, 63 aa, Artificial Sequence
  Description of Artificial Sequence: Synthetic peptide
ADYKDTFYSCLASLLTGTPQPNRGPWERCRGSLDESFYDWFERQLAAAGAPVPYPDPLEPRPG

SEQ ID NO: 2260 - protein, 36 aa, Artificial Sequence
  Description of Artificial Sequence: Synthetic peptide
WLDQERAWLWCEISGRGCLSGSLDESFYDWFERQLG

SEQ ID NO: 2261 - protein, 27 aa, Artificial Sequence
  Description of Artificial Sequence: Synthetic peptide
EDWLRCLGVILSGGLTELANTGCVQGE

SEQ ID NO: 2262 - protein, 27 aa, Artificial Sequence
  Description of Artificial Sequence: Synthetic peptide
ELQGFCELLATVTGVTGLGCLDYQPIE

SEQ ID NO: 2263 - protein, 78 aa, Artificial Sequence
  Description of Artificial Sequence: Synthetic peptide
ADYKDTFYSCLASLLTGTPQPNRGPWERCRAAAGAPADYKDWLEQERAWIWCEKGSGCRAAAAGAPVPYPDPLEPRPG

SEQ ID NO: 2264 - protein, 82 aa, Artificial Sequence
  Description of Artificial Sequence: Synthetic peptide
ADYKDSFYSCLESLVNGGAERSDGQWEGCRGGSGGSGGSGGSGVDEVRAWLWCQISGLGCESKKAAAGAPVPYPDPLEPRPG

SEQ ID NO: 2265 - protein, 82 aa, Artificial Sequence
  Description of Artificial Sequence: Synthetic peptide
ADYKDGVDEVRAWLWCQISGLGCESKKGGSGGSGGSGGSSFYSCLESLVNGGAERSDGQWEGCRAAAGAPVPYPDPLEPRPG

SEQ ID NO: 2266 - protein, 27 aa, Artificial Sequence
  Description of Artificial Sequence: Synthetic peptide
DYKDCWARPCGDAANFYDWFVQQASKK

SEQ ID NO: 2267 - protein, 26 aa, Artificial Sequence
  Description of Artificial Sequence: Synthetic peptide
SFYSCLESLVNGPAEKSRGQWDGCRK

SEQ ID NO: 2268 - protein, 19 aa, Artificial Sequence
  Description of Artificial Sequence: Synthetic peptide
  MOD_RES (19): 2-(pyridine-4-yl)malonaldehyde
GSLDESFYDWFERQLGKKX

SEQ ID NO: 2269 - protein, 19 aa, Artificial Sequence
  Description of Artificial Sequence: Synthetic peptide
  MOD_RES (1): 2-(pyridine-4-yl)malonaldehyde
XGSLDESFYDWFERQLGKK

SEQ ID NO: 2270 - protein, 21 aa, Artificial Sequence
  Description of Artificial Sequence: Synthetic peptide
  MOD_RES (1): 2-(pyridine-4-yl)malonaldehyde
XWLDQERAWLWCEISGRGCLS

SEQ ID NO: 2271 - protein, 27 aa, Artificial Sequence
  Description of Artificial Sequence: Synthetic peptide
  MOD_RES (27): diaminopropionic acid with a 2-aminohydroxyacetyl group on the side chain amino group
GIISQSCPESFYDWFAGQVSDPWWCWX

SEQ ID NO: 2272 - protein, 20 aa, Artificial Sequence
  Description of Artificial Sequence: Synthetic peptide
VSIGECGGLRHHRVRELCLV

SEQ ID NO: 2273 - protein, 20 aa, Artificial Sequence
  Description of Artificial Sequence: Synthetic peptide
ECRWFRPWRCPGLLSTGGGR

SEQ ID NO: 2274 - protein, 25 aa, Artificial Sequence
  Description of Artificial Sequence: Synthetic peptide
CDFYCALSRLSGQPRDRMPNYPGTS

What is claimed is:

1. A method of modulating insulin-like growth factor receptor activity in insulin-like growth factor-responsive mammalian cells comprising: contacting the cells with an amino acid sequence in an amount sufficient to modulate the activity of insulin-like growth factor receptor, wherein i) the amino acid sequence comprises a Formula 1 sequence, X₁X₂X₃X₄X₅, such that X₁, X₂, and X₅ are selected from the group consisting of phenylalanine and tyrosine, X₃ is selected from the group consisting of aspartic acid, glutamic acid, glycine and serine, and X₄ is selected from group consisting of tryptophan, tyrosine and phenylalanine; and ii) with the proviso that the amino acid sequence is not insulin, insulin-like growth factor, an anti-insulin receptor antibody, an anti-insulin-like growth factor receptor antibody, or fragments thereof.
